United States Patent Application Publication US 2019/0002960 A1 - sequence listing, part 9

SEQ ID NO: 9 - DNA, 2821361 bp, Staphylococcus aureus subsp. aureus NCTC 8325 (residues 1-1,410,681 of 2,821,361)
  misc_feature (2350012)..(2350012): n is a, c, g, or t
cgattaaagatagaaatacacgatgcgagcaatcaaatttcataacatcaccatgagtttggtccgaagcatgagtgtttacaatgttcgaacaccttatacagttcttatacatactttataaattatttcccaaactgttttgatacactcactaacagatactctatagaaggaaaagttatccacttatgcacatttatagttttcagaattgtggataattagaaattacacacaaagttatactatttttagcaacatattcacaggtatttgacatatagagaactgaaaaagtataattgtgtggataagtcgtccaactcatgattttataaggatttatttattgatttttacataaaaatactgtgcataactaataagcaagataaagttatccaccgattgttattaacttgtggataattattaacatggtgtgtttagaagttatccacggctgttatttttgtgtataacttaaaaatttaagaaagatggagtaaatttatgtcggaaaaagaaatttgggaaaaagtgcttgaaattgctcaagaaaaattatcagctgtaagttactcaactttcctaaaagatactgagctttacacgattaaagatggtgaagctatcgtattatcgagtattccttttaatgcaaattggttaaatcaacaatatgctgaaattatccaagcaatcttatttgatgttgtaggctatgaagttaaacctcactttattactactgaagaattagcaaattatagtaataatgaaactgctactccaaaagaaacaacaaaaccttctactgaaacaactgaggataatcatgtgcttggtagagagcaattcaatgcccataacacatttgacacttttgtaatcggacccggtaaccgctttccacatgcagcgagtttagctgtggccgaagcaccagccaaagcgtacaatccattatttatctatggaggtgttggtttaggaaaaacccatttaatgcatgccattggtcatcatgttttagataataatccagatgccaaagtgatttacacatcaagtgaaaaattcacaaatgaatttattaaatcaattcgtgataacgaaggtgaagctttcagagaaagatatcgtaatatcgacgtcttattaatcgatgatattcagttcatacaaaacaaggtacaaacacaagaagaatttttctatacttttaatgaattgcatcagaataacaagcaaatagttatttcgagtgatcgaccaccaaaggaaattgcacaattagaagaccgattacgttcacgctttgaatgggggctaattgttgatattacgccaccagattatgaaactcgaatggcaattttgcagaagaaaattgaagaagaaaaattagatattccaccagaagctttaaattatatagcaaatcaaattcaatctaatattcgtgaattagaaggtgcattaacacgtttacttgcatattcacaattattaggaaaaccaattacaactgaattaactgctgaagctttaaaagatatcattcaagcaccaaaatctaaaaagattaccatccaagatattcaaaaaattgtaggccagtactataatgttagaattgaagatttcagtgcaaaaaaacgtacaaagtcaattgcatatccgcgtcaaatagctatgtacttgtctagagagcttacagatttctcattacctaaaattggtgaagaatttggtgggcgtgatcatacgaccgtcattcatgctcatgaaaaaatatctaaagatttaaaagaagatcctatttttaaacaagaagtagagaatcttgaaaaagaaataagaaatgtataagtaggaaactttgggaaatgtaatctgttatataacagcactaatgataacaatcattttttacatttctatatgctaatgtggcaagatgagcaaaactcattttgtggataatgtttaaaagtcatacacaccatacacaagttatcaacatgtgtataacttcgccaaatctatgtttttaagacttatccaccaatccacagcacctactactattactaagaacttaaaacctatataattatatataaacgactggaaggagttttaattaatgatggaattcactattaaaagagattattttattacacaattaaatgacacattaaaagctatttcaccaagaacaacattacctatattaactggtatcaaaatcgatgcgaaagaacatgaagttatattaactggttcagactctgaaatttcaatagaaatcactattcctaaaactgtagatggcgaagatattgtcaatatttcagaaacaggctcagtagtacttcctggacgattctttgttgatattataaaaaaattacctggtaaagatgttaaattatctacaaatgaacaattccagacattaattacatcaggtcattctgaatttaatttaagtggcttagatccagatcaatatcctttattacctcaagtttctagagatgacgcaattcaattgtcggtaaaagtgcttaaaaacgtgattgcacaaacaaattttgcagtgtccacctcagaaacacgcccagtactaactggtgtgaactggcttatacaagaaaatgaattaatatgcacagcgactgactcacaccgcttggctgtaagaaagttgcagttagaagatgtttctgaaaacaaaaatgtcatcattccaggtaaggctttagctgaattaaataaaattatgtctgacaatgaagaagacattgatatcttctttgcttcaaaccaagttttatttaaagttggaaatgtgaactttatttctcgattattagaaggacattatcctgatacaacacgtttattccctgaaaactatgaaattaaattaagtatagacaatggggagttttatcatgcgattgatcgtgcctctttattagcgcgtgaaggtggtaataacgttattaaattaagtacaggtgatgacgttgttgaattgtcttctacatcaccagaaattggtactgtaaaagaagaagttgatgcaaacgatgttgaaggtggtagcctgaaaatttcattcaactctaaatatatgatggatgctttaaaagcaatcgataatgatgaggttgaagttgaattcttcggtacaatgaaaccatttattctaaaaccaaaaggtgacgactcggtaacgcaattaattttaccaatcagaacttactaaaaataaatataaataaaggatgacgtgattaattaaaacgtcatcctttattttttggcaaaaataattctaggtgcgtatgtaaaataaatttggcagcattttaaacagcaaataaaagacgccaattaaatttatgacaaatgtatccaaaatttaataagtgtgcttatatgccctttaaatttaaaattttaatagtcaataacaagttgaatataaaagttaaacgccgttaaatagcgttaaaaaattgaaaatgacagtattgccaaaaaataagaattaattatttatatgtaaacggtttctacctctattttaaatgaaatttgtgacaaaaaaaggtataatatattaatgacatacaaagaaatggagtgattattttggttcaagaagttgtagtagaaggagacattaatttaggtcaatttctaaaaacagaagggattattgaatctggtggtcaagcaaaatggttcttgcaagacgttgaagtattaattaatggagtgcgtgaaacacgtcgcggtaaaaagttagaacatcaagatcgtatagatatcccagaattacctgaagatgctggttctttcttaatcattcatcaaggtgaacaatgaagttaaatacactccaattagaaaattatcgtaactatgatgaggttacgttgaaatgtcatcctgacgtgaatatcctcattggagaaaatgcacaaggaaagacaaatttacttgaatcaatttataccttagctttagcaaaaagtcatagaacgagtaatgataaggaactcatacgttttaatgctgattatgctaaaatagaaggtgagcttagttatagacacggcacgatgccattaacaatgtttataactaaaaaaggtaaacaagtcaaagtgaatcacttagagcaaagtcgtctaactcaatatattggacacctcaatgtggttctatttgcgccagaagatttgaatattgtaaaaggctctcctcaaataagacgacgctttatagatatggagttgggccaaatttctgctgtttacttaaatgatttagctcaataccaacgtattttaaagcaaaagaataattacttaaagcagttacaattaggccaaaaaaaggacttaacaatgttggaagtattaaatcagcagtttgctgaatatgcaatgaaagtaactgataaacgtgcacattttattcaagagctagagtcgttagctaaaccgattcatgctggtatcacaaatgataaagaagcgttgtcgctgaattatttacctagtcttaaatttgattatgctcaaaatgaagcggcacgacttgaagaaattatgtctattcttagcgataatatgcaaagagaaaaagaacgaggcattagcttattcggaccacatcgagatgatataagttttgatgtgaatggcatggatgctcaaacatatggttctcaaggacagcaacgtacaacggctttgtccattaaattagctgaaattgagttaatgaatatcgaagttggggaatatcccatcttattattagacgatgtactcagtgaattagatgattcgcgtcaaacgcatttattaagtacgattcagcataaagtacaaacatttgtcactacgacatctgtagatggtattgatcatgaaatcatgaataacgctaaattgtatcgtattaatcaaggtgaaattataaagtaacagaaagcgatggtgactgcattgtcagatgtaaacaacacggataattatggtgctgggcaaatacaagtattagaaggtttagaagcagtacgtaaaagaccaggtatgtatataggatcgacttcagagagaggtttgcaccatttagtgtgggaaattgtcgataatagtatcgatgaagcattagctggttatgcaaatcaaattgaagttgttattgaaaaagataactggattaaagtaacggataacggacgtggtatcccagttgatattcaagaaaaaatgggacgtccagctgtcgaagttattttaactgttttacatgctggtggtaaatttggcggtggcggatacaaagtatctggtggtttacatggtgttggttcatcagttgtaaacgcattgtcacaagacttagaagtatatgtacacagaaatgagactatatatcatcaagcatataaaaaaggtgtacctcaatttgacttaaaagaagttggcacaactgataagacaggtactgtcattcgttttaaagcagatggagaaatcttcacagagacaactgtatacaactatgaaacattacagcagcgtattagagagcttgctttcttaaacaaaggaattcaaatcacattaagagatgaacgtgatgaagaaaacgttagagaagactcctatcactatgagggcggtattaaatcgtacgttgagttattgaacgaaaataaagaacctattcatgatgagccaatttatattcatcaatctaaagatgatattgaagtagaaattgcgattcaatataactcaggatatgccacaaatcttttaacttacgcaaataacattcatacgtatgaaggtggtacgcatgaagacggattcaaacgtgcattaacgcgtgtcttaaatagttatggtttaagtagcaagattatgaaagaagaaaaagatagactttctggtgaagatacacgtgaaggtatgacagcaattatatctatcaaacatggtgatcctcaattcgaaggtcaaacgaagacaaaattaggtaattctgaagtgcgtcaagttgtagataaattattctcagagcactttgaacgatttttatatgaaaatccacaagtcgcacgtacagtggttgaaaaaggtattatggcggcacgtgcacgtgttgctgcgaaaaaagcgcgtgaagtaacacgtcgtaaatcagcgttagatgtagcaagccttccaggtaaattagccgattgctctagtaaaagtcctgaagaatgtgagattttcttagtcgaaggggactctgccggggggtctacaaaatctggtcgtgactctagaacgcaggcgattttaccattacgaggtaagatattaaatgttgaaaaagcacgattagatagaattttgaataacaatgaaattcgtcaaatgatcacagcatttggtacaggaatcggtggcgactttgatctagcgaaagcaagatatcacaaaatcgtcattatgactgatgccgatgtggatggagcgcatattagaacattgttattaacattcttctatcgatttatgagaccgttaattgaagcaggctatgtgtatattgcacagccaccgttgtataaactgacacaaggtaaacaaaagtattatgtatacaatgatagggaacttgataaacttaaatctgaattgaatccaacaccaaaatggtctattgcacgatacaaaggtcttggagaaatgaatgcagatcaattatgggaaacaacaatgaaccctgagcaccgcgctcttttacaagtaaaacttgaagatgcgattgaagcggaccaaacatttgaaatgttaatgggtgacgttgtagaaaaccgtagacaatttatagaagataatgcagtttatgcaaacttagacttctaagcgctgtgaactgaacttttgaaggaggaactcttgatggctgaattacctcaatcaagaataaatgaacgaaatattaccagtgaaatgcgtgaatcatttttagattatgcgatgagtgttatcgttgctcgtgcattgccagatgttcgtgacggtttaaaaccagtacatcgtcgtatactatatggattaaatgaacaaggtatgacaccggataaatcatataaaaaatcagcacgtatcgttggtgacgtaatgggtaaatatcaccctcatggtgactcatctatttatgaagcaatggtacgtatggctcaagatttcagttatcgttatccgcttgttgatggccaaggtaactttggttcaatggatggagatggcgcagcagcaatgcgttatactgaagcgcgtatgactaaaatcacacttgaactgttacgtgatattaataaagatacaatagattttatcgataactatgatggtaatgaaagagagccgtcagtcttacctgctcgattccctaacttattagccaatggtgcatcaggtatcgcggtaggtatggcaacgaatattccaccacataacttaacagaattaatcaatggtgtacttagcttaagtaagaaccctgatatttcaattgctgagttaatggaggatattgaaggtcctgatttcccaactgctggacttattttaggtaagagtggtattagacgtgcatatgaaacaggtcgtggttcaattcaaatgcgttctcgtgcagttattgaagaacgtggaggcggacgtcaacgtattgttgtcactgaaattcctttccaagtgaataaggctcgtatgattgaaaaaattgcagagctcgttcgtgacaagaaaattgacggtatcactgatttacgtgatgaaacaagtttacgtactggtgtgcgtgtcgttattgatgtgcgtaaggatgcaaatgctagtgtcattttaaataacttatacaaacaaacacctcttcaaacatcatttggtgtgaatatgattgcacttgtaaatggtagaccgaagcttattaatttaaaagaagcgttggtacattatttagagcatcaaaagacagttgttagaagacgtacgcaatacaacttacgtaaagctaaagatcgtgcccacattttagaaggattacgtatcgcacttgaccatatcgatgaaattatttcaacgattcgtgagtcagatacagataaagttgcaatggaaagcttgcaacaacgcttcaaactttctgaaaaacaagctcaagctattttagacatgcgtttaagacgtctaacaggtttagagagagacaaaattgaagctgaatataatgagttattaaattatattagtgaattagaagcaatcttagctgatgaagaagtgttattacagttagttagagatgaattgactgaaattagagatcgtttcggtgatgatcgtcgtacagaaattcaattaggtggatttgaagacttagaggacgaagacttaattccagaagaacaaatagtaattacactaagccataataactacattaaacgtttgccggtatctacatatcgtgctcaaaaccgtggtggtcgtggtgttcaaggtatgaatacattggaagaagattttgtcagtcaattggtaactttaagtacacatgaccatgtattgttctttactaacaaaggtcgtgtatacaaacttaaaggttacgaagtgcctgagttatcaagacagtctaaaggtattcctgtagtgaatgctattgaacttgaaaatgatgaagtcattagtacaatgattgctgttaaagaccttgaaagtgaagacaacttcttagtgtttgcaactaaacgtggtgtcgttaaacgttcagcattaagtaacttctcaagaataaatagaaatggtaagattgcgatttcgttcagagaagatgatgagttaattgcagttcgcttaacaagtggtcaagaagatatcttgattggtacatcacatgcatcattaattcgattccctgaatcaacattacgtcctttaggccgtacagcaacgggtgtgaaaggtattacacttcgtgaaggtgacgaagttgtagggcttgatgtagctcatgcaaacagtgttgatgaagtattagtagttactgaaaatggttatggtaaacgtacgccagttaatgactatcgcttatcaaatcgtggtggtaaaggtattaaaacagctacgattactgagcgtaatggtaatgttgtatgtatcactacagtaactggtgaagaagatttaatgattgttactaatgcaggtgtcattattcgactagatgttgcagatatttctcaaaatggtcgtgcagcacaaggtgttcgcttaattcgcttaggtgatgatcaatttgtttcaacggttgctaaagtaaaagaagatgcagaagatgaaacgaatgaagatgagcaatctacttcaactgtatctgaagatggtactgaacaacaacgtgaagcggttgtaaatgatgaaacaccaggaaatgcaattcatactgaagtgattgattcagaagaaaatgatgaagatggacgtattgaagtaagacaagatttcatggatcgtgttgaagaagatatacaacaatcatcagatgaagaataataaaaaataagacttccctatatgtaggggagtcttatttttatgctagaaagtaatgctttactatattcaatgattagtaatgactaactttctaattgtttcattgcgtaaggtatttcattgataagtcttgatggtggcaccacatacatatcttttgcaaggttttcgccaataaaactatgtgtatatgtggcactcataaccgcttcttttaagttatcaaattgaccgacaaagcttgtaatcataccagcaagtgtatcgcccataccaccagtcgccattgctgggctaccgattgtcaatttaaagtcttcatctttaaagaaaatttcagtaccatgttttttaagtacaacagttgcacctaaacgatcaactgcttcacgattacgctcatatgtctgttcctcaataggaataccacttaatcgttcccattctttgaggtgtggtgtaaagatcacacgacatgtaggtaattgcggtttcagtttactaaagattgtaatcgcatcgccgtctacgattaaattttgatgcggttgtatattttgtagtaggaatgtaatggcattatttcctttgaaatcaacgccaagacctggaccaattagtatactgtcagtcatttcaatcattttcgtcaacattttcgtatcattaatatcaataaccatcgcttctgggcaacgagaatgtaatgctgaatgatttgttggatgtgtagctacagtgattaaaccactaccgctaaatacacatgcacgagccgctaacataatggcaccacctaagttagcagatccaccaattaataaaattttgccataatcacctttatgtgaatcttctttacgcttaggaatgttaatagaatttaacgtttccatagtgatataacctcccatgtaaaagccttttccgaatttattcaattttaaaaatatatagtaacttttaacaaaatgtattataaatttctgaattcattattatttgtcgttaaatacaatagaaaatactatacctgtatatgcaattcgtcaatagataaattattaaatatgcttacaacaatcttaatatcctttaacgcactacaatagtgctctgataataggttataaatgtacgtaaaaccattgtttcaataaaaatgaaaacgtatacttcaagaaggatgggttacttaatataaacaagggggtaacatatatgactttatatttagatggtgaaacactaacaattgaggatattaaatcatttttacaacaacaatcaaagattgaaattattgatgatgcgttagaacgtgtcaaaaaaagtagagcggtagttgaacgtattattgaaaatgaggaaacggtttacggtattactacaggttttgggttatttagtgatgtacgtatagacccgacgcaatataatgaattacaagtgaatctgatacgctcacatgcctgtggactaggtgagccattttcaaaagaagtagcattagtcatgatgattttacgattgaatacattattaaaaggtcattcaggtgccactttagaattagtgagacaattacaattttttataaatgaacgtattataccgataatcccacagcaaggctctctcggtgcatcaggagatttagcgccattatcacatttagcattagcattaattggtgaagggaaagtattgtacagaggggaagaaaaggatagtgacgatgtattaagagaattaaatagacaacctttgaaccttcaggctaaagaaggtttagcattgattaatggtacgcaagctatgacagctcaaggtgtcattagttatatagaagcagaagatttaggttaccaatctgaatggattgctgcattaacgcatcagtctcttaatggcattatagatgcatatcgacatgatgtgcacgcagttcgtaattttcaagaacagattaatgtggcagcgcgtatgcgtgattggttagaaggatcaacattaacgacgcgacaatcagaaatacgtgtacaagatgcatatacgttgcgttgtataccacaaatccatggcgcgagttttcaagtattcaattatgttaaacagcaattagaatttgaaatgaatgcggctaatgataatccacttatatttgaggaagcaaatgaaacgtttgttatttcaggtggtaacttccatggacaacctattgcttttgcattagatcatcttaaattaggtgtaagtgaattagcaaacgtatcggaacgtcgtctagagcgactagtaaatcctcaattaaatggtgatttaccagcatttcttagtccagagccaggattgcaaagtggcgcgatgattatgcaatatgctgctgcaagtctcgtttctgaaaataaaactttagcgcatccagcgagtgttgattctatcacttcatctgcgaaccaagaagatcacgtatctatgggaactacagctgctagacatggttatcaaattattgaaaatgcaagacgtgtgctggcaatcgaatgtgttattgcattacaagcagcagagttaaaaggtgttgaaggattatcaccaaaaacacgtcgcaagtatgatgagtttcgaagtatcgtgccatccattacacatgatcgtcaatttcataaagatattgaagcggttgcacagtatttaaagcaatcaatttatcaaacgactgcatgtcactaaatcgacatgagtgatgtttgaaatcgttacttgaaaaagcaaatatagtttgctatattaaaaataacttaataagacattgttcgtaggacaagtaatatatagtgttcgatatcagagagcttgtggttagtgtgaacaagaatcaacatatatatgaatctacctacttaatttaaaagaacaatcggtgataaccgttattttagtgaagtgcaatttaggtttagtgtatctttataacttaaattgttaaatagggtggcaacgcgtagaccacgtcccttgtagggatgtggtctttttttattttctaaaaaataaagacgtacgtcattccataataaatgataattatttgggaaaggatgaaggttaatgttagacattagattattcagaaatgagcctgacacagttaagagcaaaattgaattacgtggagatgatccaaaagttgtagatgaaattttagaattggatgagcaacgacgtaaattaattagtgcaacagaagaaatgaaagcacgtcgtaataaagtaagcgaagaaatcgcattaaaaaaacgtaataaagaaaatgctgatgatgtgattgctgaaatgcgcacattaggtgacgatattaaagaaaaagatagtcaattaaatgaaattgataataaaatgacaggtatcctttgtcgtattccaaatttaataagtgatgatgtacctcaaggtgaatctgatgaagataacgttgaagttaaaaagtggggtacaccacgtgagttttcatttgaacccaaagcacattgggatattgtagaagaattgaaaatggctgattttgatcgtgcagcaaaagtttcaggtgcgcgttttgtatatttaacaaatgaaggtgcgcaattagagcgtgctttaatgaactatatgattacaaaacatacaacacaacatggttatacagaaatgatggtaccacagcttgtgaacgcagatacaatgtatggtacaggtcaattacctaaatttgaagaagatttatttaaagtagaaaaagaaggattatatacaattccaactgctgaagtaccattaacgaatttctaccgtaatgaaattattcaaccaggtgtacttcctgaaaaattcactggtcaatctgcatgtttccgtagtgaagcaggatcagcaggtagagatacaagaggattaattcgtttacatcaattcgataaagtggaaatggtacgttttgaacaacctgaagattcatggaatgctttagaagaaatgacaacaaacgcagaagcaattctagaagagttaggtttaccataccgtcgtgttattttatgtacaggtgatattggatttagtgcaagcaaaacatatgatttagaagtttggttaccaagctacaatgattataaagaaattagttcatgctcaaactgtacggatttccaagcgcgtcgtgctaacatccgcttcaagcgtgacaaagcagctaaaccagaattagcacatacattaaatggtagtggtttagcagttggacgtacatttgctgctattgttgaaaattaccaaaatgaagatggaacagtaacaattccagaagcattagtaccatttatgggtggtaaaacacaaatttcaaaaccagttaaataaaggctttagctacaagctttaaaaagtatatatctacgtatacttaaagcaagggcaagatactttaaataatattttaaaaagtggtgacgaagctgtcgccactttttttgtgctgtaaaaatataatagtgagccaatgcacataacaacaataaattaagtttgtggtttaatggggtgaacgcatttcattatagcaacaatacgggataattatgatgaactaaaacaatctaaaacgtaacaagtttgagcatcactaatataggaaaggaagcgataaaatactgatttcgttgatatgtagtatgagttatatcgatggagtagggtagggggaggggatgattataagggagtggtacatgaatcaatatcccagactcatcatcagatataaaaatttataaaattgatacttaaaaacaactacaaatccatagaaaatatggaggtagtcttaaataaaaaattgaaaattctcaaaaataaaaagttaatatgaagctgactaaagactccggaatgtctaacctcagacaaactgatgtctaatgttattgcttagggtatagaactgtattagactaggtatattattttttcgtaattatataaatataaagtggcaaaggaggtaattgagatgacaacacatttaagttttagacaaggcgtgcaagagtgtatcccaacattattgggttatgccggtgttggtatttcatttggtattgtggcttcgtctcaaaactttagtattttagaaattgtcttgttatgtcttgttatatatgccggtgctgcgcaatttattatgtgcgcgttgtttatagcaggtacacctatatcagcgattgtactaactgtatttatcgtaaattcaagaatgttccttttaagtatgtcgcttgcaccaaacttcaagacatatgggttttggaaccgtgttggattaggttcattagtaactgacgaaacgtttggcgtcgccattacaccttatttaaaaggagaagctatcaatgatcgttggatgcatggtcttaacatcacagcatatttattttgggcaatttcatgtgtagctggggctttatttggcgaatatatctcaaatccgcaaacgctagggttagattttgctatcacggctatgtttatctttttggccattgcgcaatttgaatcaattactaaatcgcgattaagaatttacatagtactcattattgccgtcatagtaatgatgttatcgctaagtatgtttatgccttcatatctagcaatattaattgcagccacaatttcagcagcgttaggagtgatgatggaacaatgataactcatatgaacatgttaatacttattttattgtgtggtatcgtaacgctattaattcgaattataccttttatcatgatttcaaaagtgcaattgcctgatgtcgtggttcgatggctatcatttatcccaatcacactatttacggcacttgtcattgacagcattattcaacagacgcctcatggtgaggggtatacattaaacatcccttacattatcgcgctcattccgacggttattttatctataatcacgcgtagtttaactattacaattattagtgggattgttatcatggcagcattacgatttttcttttaaaaataactgaaaatcattgaacagatatttaaacttaggtaaactgttagtaatcagaaaattctgatatacaaatcgtctatgttaagattgggaatcgtgtatacgtaagcgatttggctaacgcatgacaatgataacaacattttaaatgataaaagtaattcatcactgaatctcaactaacacataacaatttcatatttcttattgtgagaagttgagggacttggccctgtgatacttcagcaaccgactttatagcacggtgctaaaaccaacgagttactcgaatgataagtataaagacttcttacttttcaatagggtgagaagtttttttgtttaaggaggaaagaacaatgacaaattacacagtagatactttaaatttaggggaatttattacagaatctggggaagtcatagataacttgcgtttgagatatgagcatgtcggttatcatggacaaccattagttgtagtttgtcatgcattaactggcaatcatttaacatatggaacagatgattatccgggttggtggcgagaaattattgatgggggatatatacccattcacgattatcaatttttaacatttgatgttattggtagtcctttcggttcaagttcacctttaaacgaccctcattttcctaaaaaattaacattaagagatatagtcagagcgaatgaacgaggtatacaagcccttggttatgataagattaatattttaatagggggaagtcttggaggtatgcaagcaatggaactactctacaatcaacagtttgaagtagataaagccattatccttgctgcaacaagtcgaacatcatcttatagtagagctttcaatgaaattgcaaggcaagccattcatcttggtggtaaggaaggtctaagtattgcacgccaattaggttttttgacatatcgatcatcaaaaagttatgatgaacgttttacgccggatgaagtagtcgcataccaacaacatcaaggtaataaatttaaagaacattttgatttgaattgttatctgacactgctagatgtattggatagtcacaacattgaccgaggtcgcacagacgtaacgcatgtttttaaaaatttagaaacaaaagtgttaacgatggggttcatagatgatttgctatatccggatgatcaagttcgtgcattaggtgaacgttttaaatatcatcgtcatttcttcgtgcctgataatgttgggcatgatggattcctactaaactttagtacctgggcacctaacttatatcatttcttaaatttaaagcattttaagcgtaagtaataatatatattttcaaagaatgaagccactaaatcacagttatcatattcaaaaacatctagagtacatgagagtggaaatgtattgtaaatctaaatcaagcttgattgctatgtagtgggattaaataatcatgttgaaaatgaaagcacacaaaagcgattcaaatgagtatgttaattacttataaaacatgaaagttattattcaattaaatgaaatagaagcatacaatctataaattgttaattttcattaaagaggttaaaataatagctatagttaaaaatatgggagtggcttatgtgttttcaaaaatacaacctaaagcaacaataattgcaacgattgcgttggtatttgtcgctttagctttatatctagtgcctggtttaggactaatatttgcattatttgcaaccataccaggtatcgttttatggaataaatcaatacaatctttcgggattagtgcacttattacagtaattataacaactgttttaggtaatactttcgttttaagtgccatcatattagtcttaattgcaagtttaattattggtcaattgctcaaagaaagaacgtctaaagaaagaatattatacgtaacaacagtagcgatgagcttaatttcattaatcgcttttatgttactacaaacattcggaaggattccaccatcagcgagcatagtaaaacctttcaagcaaacattacatgaagcgattacgatgagcggtgccgatgcgaatatgacccaaatattagaagaagggtttagacaagcgaccgttcaattaccaggtttcatcattatcattacatttttaatcgtcttaattaacttaatcgttacatttccgattttacgaaaatttaaaatcgctacacctgtatttaagccacttttcgcgtggcaaatgagcggtattttattatggatatacattattgttatcatatgtttattatttacaggtcaaccgagtgtgttccagagcattcttttaaacttccaacttgtgttatcattagtaatgtatattcaaggtttaagtgttattcatttctttggtaaagcgaaaggtttgccgaatgcagtaacgattttactattggttatcggtacaatactgacacctacgacacatattgtaggactacttggtgttatcgatttaagtttgaatttgaagcgaatcatgaaaaataattctaaaaagtgaatagaggtggaataatgaatcggcagtccactaagaaagctttactaataccatttgtcatcatgatcatcacagcaattgttttaatgggtgtatggtttatctttaatagtcttatagcactaattgcatctatcgttcttgtcgtgatgattattgttagcatcattttattcagacaagctttaatgaaaatggatagttatgtagatggtttgagtgctcaaatttcaacaacaaataataaagcaatcaaacatttaccaattggtatcattgttttagatgaaaatgatcacatcgaatgggttaaccaatttatgacagatcatatggaagcgaatgtcatttctgaatctgtaaatgaagtatttccaaacattttaaagcaattagatagagtgaaatccgttgaaatagaatataatcagtatcatttccaagtacgttattctgagaatgatcactgcctctatttctttgatataactgaacaagtacaaacaaatgaactatatgaaaattctaaaccaatcattgcgacattatttttagataactacgatgagattacgcaaaatatgaatgatacgcagcgttcggaaatcaactcaatggtaacgcgtgtcattagtcgatgggcaactgagtataatatatttttcaaaagatacagttccgatcaattcgtagcctatttaaatcaaaaaatattagctgacttagaagaatctaaatttgatatcttgagtcaattacgtgaaaaaagtgttggttatcgtgcccaattaacattaagtatcggtgttggtgaaggtactgaaaatttaatcgacttaggtgaattatcacaatcaggcctagacttagcattaggacgcggtggcgaccaagttgcaattaaaagtattaatggtaatgtgcgtttctatggcggtaagactgacccgatggagaaacgtactcgtgtaagagcacgtgtgatctcacatgcgttaaaagatatccttgcagagggtgacaaagtcattatcatgggacataaacgtcctgacttagatgcaattggtgcagcaatcggtgtgtctagatttgcaatgatgaataatttagaagcatacatcgtattaaatgagactgacattgatccaacattacgacgcgtgatgaacgaaatagataaaaagccagagttaagagagcgatttattacatcagatgatgcttgggatatgatgacatctaagacaaccgtagtgattgttgatacgcataaaccggaactggttttagatgaaaatgtcttaaataaagcaaaccgtaaagttgttatcgatcatcatagacgtggtgaaagcttcatctctaatccattgttgatatatatggaaccatacgcaagttcgacagctgaattggtaacagagttactggaatatcaaccaacagaacaacgtttaacacgtcttgaatcaacagtgatgtatgcaggtattattgtagatacaagaaactttacattacgaacaggatcaagaacattcgatgcagcgagttatttacgtgcacatggtgcagatacgattttaacgcaacatttcttaaaagatgatgtggatacttacattaatcgatctgaattaattcgaactgtaaaagttgaagataatggcatagccattgcgcatggttcagacgataaaatttatcatccagtaacagttgcacaagcagcagatgaactgttaagtttagaaggtattgaagcatcatatgttgttgcgagacgtgaagataatctgattggtatatctgcgcgttcactcggttcagtaaatgtccagttaacaatggaagcacttggtggcggtggacatttaaccaatgcggcaacacaacttaaaggtgtgacagtcgaagaggcgatagcacaattacaacaagcaattacagaacaattaagtaggagtgaagatgcatgaaagtaatttttacacaagatgttaaaggtaaaggtaaaggtaaaaaaggtgaagttaaagaagtaccagtaggttatgcaaataacttcttattgaaaaagaattatgctgtagaagcaacaccaggtaaccttaaacaattagagttacagaaaaaacgtgcaaaacaagaacgccaacaagaaattgaagatgctaaagcattaaaagaaacgttatcaaacattgaagttgaagtatcagcaaaaactggtgaaggtggtaaattgtttgggtcagtaagtacaaaacaaattgccgaagcactaaaagcacaacatgatattaaaattgataaacgtaaaatggatttaccaaatggaattcattccctaggatatacgaatgtacctgttaaattagataaagaagttgaaggtacaattcgcgtacacacagttgaacaataaagttggattgaaataagaggtgtaaccattcatggatagaatgtatgagcaaaatcaaatgccgcataacaatgaagctgaacagtctgtcttaggttcaattattatagatccagaattgattaatactactcaggaagttttgcttcctgagtcgttttataggggtgcccatcaacatattttccgtgcaatgatgcacttaaatgaagataataaagaaattgatgttgtaacattgatggatcaattatcgacggaaggtacgttgaatgaagcgggtggcccgcaatatcttgcagagttatctacaaatgtaccaacgacgcgaaatgttcagtattatactgatatcgtttctaagcatgcattaaaacgtagattgattcaaactgcagatagtattgccaatgatggatataatgatgaacttgaactagatgcgattttaagtgatgcagaacgtcgaattttagagctatcatcttctcgtgaaagcgatggctttaaagacattcgagacgtcttaggacaagtgtatgaaacagctgaagagcttgatcaaaatagtggtcaaacaccaggtatacctacaggatatcgagatttagaccaaatgacagcagggttcaaccgaaatgatttaattatccttgcagcgcgtccatctgtaggtaagactgcgttcgcacttaatattgcacaaaaagttgcaacgcatgaagatatgtatacagttggtattttctcgctagagatgggtgctgatcagttagccacacgtatgatttgtagttctggaaatgttgactcaaaccgcttaagaacgggtactatgactgaggaagattggagtcgttttactatagcggtaggtaaattatcacgtacgaagatttttattgatgatacaccgggtattcgaattaatgatttacgttctaaatgtcgtcgattaaagcaagaacatggcttagacatgattgtgattgactacttacagttgattcaaggtagtggttcacgtgcgtccgataacagacaacaggaagtttctgaaatctctcgtacattaaaagcattagcccgtgaattaaaatgtccagttatcgcattaagtcagttatctcgtggtgttgaacaacgacaagataaacgtccaatgatgagtgatattcgtgaatctggttcgattgagcaagatgccgatatcgttgcattcttataccgtgatgattactataaccgtggcggcgatgaagatgatgacgatgatggtggtttcgagccacaaacgaatgatgaaaacggtgaaattgaaattatcattgctaagcaacgtaacggtccaacaggcacagttaagttacattttatgaaacaatataataaatttaccgatatcgattatgcacatgcagatatgatgtaaaaaagtttttccgtccaataatcattaagatgataaaattgtacggtttttattttgttctgaacgggttgatatatgttaagtttgtgtattgaaagtgataaattagtactgtcaacgcctctgttaaagggtttttaggacgttgaaaacgatttgttaaaatgatttttcttttaaaaaggccgaaaatcaatgttcgatttttatttgcattatggtctcgatattggtagaatatcaaatggttaaatgagaaaaacttggaggtgctcacatgtcatcaatcgtagtagttgggacacaatggggagacgaaggaaaaggaaaaataacggatttcttggcagaacagtcagatgttatcgcgcgtttttcaggtggtaataatgcaggccataccattcaatttggcggagaaacatataaattacatttagtaccatctggtatcttttacaaagacaaattagcggtaatcggtaacggagtcgttgttgatccagttgcactattgaaagaattagacggattaaatgaacgtggcattcctacaagtaatttacgtatatctaatcgtgcgcaagtgattttaccatatcacttagcacaagatgaatatgaagaacgtttacgtggtgacaataagattggtacaactaaaaaaggtatcggtccagcatatgtagacaaagttcaacgtatcggtattcgtatggcagatttacttgaaaaagaaacattcgaaagattattaaaatcaaacattgaatataaacaagcatatttcaaaggtatgtttaacgaaacatgtccatcatttgatgatatctttgaagaatattatgcagcaggtcaacgtctaaaagaatttgtaacagacacatcaaaaatcttagacgatgcatttgtagcagatgaaaaggtacttttcgaaggtgcgcaaggtgtaatgttagatatcgaccatggtacatatccattcgttacatcaagtaatccaattgcaggtaacgttactgttggtacaggtgtaggtcctacattcgtttcaaaggtaattggtgtatgtaaagcttatacatcacgtgttggtgatggtccattccctactgaattattcgatgaagatggacatcatattagagaggttggtcgtgaatacggtacaacaacaggacgtccacgtcgtgtaggttggtttgattcagttgtattacgtcactctcgtcgtgtaagtggtattacagatttatctattaactcaatcgatgttttaacaggcctagacacagtgaaaatctgtacagcttatgaattagacggtaaagaaattactgagtacccagcaaacttagatcaattaaaacgttgtaaaccaatctttgaagagttaccaggttggacagaagacgtaacaaatgtgcgtactttagaagaattacctgaaaatgcacgtaaatatttagagcgtatttcagaattatgtaatgtacaaatttctatcttctcagttggtccagatagagaacaaacaaacctattaaaagaattgtggtagaactttatataagtcatacacaatgattataaatacatgagccttctatctttattggtaggaggcttttgttatgcttgcttctgtatcgattcgattatttagataaaaaatactaacgtaaaggcgatatttgctagtcataatttagaagattagatgatatttaacgaaaattaagatgaaatacttgaatgtaagaagtctgatgtcgaaaatagctattaaaatagagtagacgtaagtgtaaatgaaagcacctaaaatagaaaaatttcaaaaatagcgtaattattataataaatagactgccaataaaatgcaatttttcacttataacattcttcaaaaaataatagcaaaattatgtaaaaaatatcttgtcatggcaagattggctgtgctataatctatcttgtgcttaagaacggctccttggtcaagcggttaagacaccgccctttcacggcggtaacacgggttcgagtcccgtaggagtcaccattttttaggtctcgtagtgtagcggttaacacgcctgcctgtcacgcaggagatcgcgggttcgattcccgtcgagaccgtacaaatgcctatccaagaggataggcatttttttgcgtttaatattatattaataaaagatatatggacgaatgataatcatattgatttatctgttcgtccattttctttaaaatgtatgaacctcaagtaacttagtggttggatatgaaagataaacgtagacaataaaatctttattagacgtacaaacatatgctactgtcaacatatttcttcgttgtgatatgccaccagtcctccataacatcaattgttaaagtaacgaataacgaataatgatatttattttctgagcaatgacgtgcaactagaagttgccattatcctaattttattattggaatagagacctcatcattgtgttaaatatcattgtcacaatccgccgtgagaaactaataaaaaatagtaatatataagtttatattggaaaatagaattaatagcttataaatggtaaattatataataggttactatacgttataagacggaaaatgcgcacaataacaaaaatagtaagcgacatcctgtgattttttacacaaacataaacgataaagaacaaaaaatgataaaataatattaatgatttaagaaaagaggtttatgcaaatggctagaaaagttgttgtagttgatgatgaaaaaccgattgctgatattttagaatttaacttaaaaaaagaaggatacgatgtgtactgtgcatacgatggtaatgatgcagtcgacttaatttatgaagaagaaccagacatcgtattactagatatcatgttacctggtcgtgatggtatggaagtatgtcgtgaagtgcgcaaaaaatacgaaatgccaataataatgcttactgctaaagattcagaaattgataaagtgcttggtttagaactaggtgcagatgactatgtaacgaaaccgtttagtacgcgtgaattaatcgcacgtgtgaaagcgaacttacgtcgtcattactcacaaccagcacaagacactggaaatgtaacgaatgaaatcacaattaaagatattgtgatttatccagacgcatattctattaaaaaacgtggcgaagatattgaattaacacatcgtgaatttgaattgttccattatttatcaaaacatatgggacaagtaatgacacgtgaacatttattacaaacagtatggggctatgattactttggcgatgtacgtacggtcgatgtaacgattcgtcgtttacgtgaaaagattgaagatgatccgtcacatcctgaatatattgtgacgcgtagaggcgttggatatttcctccaacaacatgagtagaggtcgaaacgaatgaagtggctaaaacaactacaatcccttcatactaaacttgtaattgtttatgtattactgattatcattggtatgcaaattatcgggttatattttacaaataaccttgaaaaagagctgcttgataattttaagaagaatattacgcagtacgcgaaacaattagaaattagtattgaaaaagtatatgacgaaaagggctccgtaaatgcacaaaaagatattcaaaatttattaagtgagtatgccaaccgtcaagaaattggagaaattcgttttatagataaagaccaaattattattgcgacgacgaagcagtctaaccgtagtctaatcaatcaaaaagcgaatgatagttctgtccaaaaagcactatcactaggacaatcaaacgatcatttaattttaaaagattatggcggtggtaaggaccgtgtctgggtatataatatcccagttaaagtcgataaaaaggtaattggtaatatttatatcgaatcaaaaattaatgacgtttataaccaattaaataatataaatcaaatattcattgttggtacagctatttcattattaatcacagtcatcctaggattctttatagcgcgaacgattaccaaaccaatcaccgatatgcgtaaccagacggtcgaaatgtccagaggtaactatacgcaacgtgtgaagatttatggtaatgatgaaattggcgaattagctttagcatttaataacttgtctaaacgtgtacaagaagcgcaggctaatactgaaagtgagaaacgtagactggactcagttatcacccatatgagtgatggtattattgcaacagaccgccgtggacgtattcgtatcgtcaatgatatggcactcaagatgcttggtatggcgaaagaagacatcatcggatattacatgttaagtgtattaagtcttgaagatgaatttaaactggaagaaattcaagagaataatgatagtttcttattagatttaaatgaagaagaaggtctaatcgcacgtgttaactttagtacgattgtgcaggaaacaggatttgtaactggttatatcgctgtgttacatgacgtaactgaacaacaacaagttgaacgtgagcgtcgtgaatttgttgccaatgtatcacatgagttacgtacacctttaacttctatgaatagttacattgaagcacttgaagaaggtgcatggaaagatgaggaacttgcgccacaatttttatctgttacccgtgaagaaacagaacgaatgattcgactggtcaatgacttgctacagttatctaaaatggataatgagtctgatcaaatcaacaaagaaattatcgactttaacatgttcattaataaaattattaatcgacatgaaatgtctgcgaaagatacaacatttattcgagatattccgaaaaagacgattttcacagaatttgatcctgataaaatgacgcaagtatttgataatgtcattacaaatgcgatgaaatattctagaggcgataaacgtgtcgagttccacgtgaaacaaaatccactttataatcgaatgacgattcgtattaaagataatggcattggtattcctatcaataaagtcgataagatattcgaccgattctatcgtgtagataaggcacgtacgcgtaaaatgggtggtactggattaggactagccatttcgaaagagattgtggaagcgcacaatggtcgtatttgggcaaacagtgtagaaggtcaaggtacatctatctttatcacacttccatgtgaagtcattgaagacggtgattgggatgaataataaggagcatattaaatctgtcattttagcactactcgtcttgatgagtgtcgtattgacatatatggtatggaacttttctcctgatattgcaaatgtcgacaatacagatagtaagaagagtgaaacgaaacctttaacgacacctatgacagccaaaatggatacaactattacgccatttcagattattcattcgaaaaatgatcatccagaaggaacgattgcgacggtatctaatgtgaataaactgacgaaacctttgaaaaataaagaagtgaagtccgtggaacatgttcgtcgtgatcataacttgatgattcctgatttgaacagtgattttatattattcgattttacgtatgatttaccgttatcaacatatcttggtcaagtactgaacatgaatgcgaaagtaccaaatcatttcaatttcaatcgtttggtcatagatcatgatgctgatgataatatcgtgctttatgctataagcaaagatcgccacgattacgtaaaattaacaactacaacgaaaaatgatcattttttagatgcattagcagcagtgaaaaaagatatgcaaccatacacagatatcatcacaaacaaagatacaattgatcgtacgacgcatgtttttgcaccaagtaaacctgaaaagttaaaaacatatcgcatggtatttaacacgattagtgttgagaaaatgaatgctatactatttgacgattcaaccatcgttcgtagttcaaagagtggtgttacaacctacaacaataatacaggtgtcgcaaactataacgataaaaatgaaaaatatcattataaaaacctgtccgaagatgaagcgagttccagcaaaatggaagaaacgattccaggaacctttgattttattaatggtcatggtggtttcttaaacgaagactttagattgtttagtacgaataatcagtcaggcgagttaacatatcaacgtttccttaatggttatccaacgtttaataaagaaggttctaatcaaattcaagtcacttggggtgaaaaaggcgtctttgactatcgtcgttcgttattacgcaccgacgttgttttaaatagtgaggataataaatcgttgccgaaattagagtctgtacgttcaagcttagcgaacaatagtgatattaattttgaaaaagtaacaaacatcgctatcggttacgaaatgcaggataattcagatcataatcacattgaagtgcagattaacagtgaactcgtaccgcgttggtatgtagaatatgatggcgaatggtatgtttataacgatgggaggcttgaataaatgaactggaaactgacaaagacacttttcattttcgtgtttattcttgtcaacatcgtgttagtatcgatttatgttaataaagtcaatcgctcacacattaatgaagtcgagagtaacaatgaagttaattttcagcaagaagaaattaaagtaccgactagtatattgaataaatcagttaaaggtataaaattagagcaaattacagggcgatcaaaagactttagttctaaagctaaaggcgattcggatttgaccacatcagatggtggaaaattattgaatgcgaacattagtcaatcggtaaaggtcagtgacaataacttaaaagatttgaaagattatgttaacaagcgcgtatttaaaggtgctgaatatcaattaagcgagattagttcagattctgtaaaatatgaacaaacgtatgatgattttccgattttaaataacagtaaagcgatgttaaactttaatatagaagataacaaagcgactagttataaacaatcaatgatggatgacattaagcccacagatggtgcagataagaagcatcaagtgattggtgtgagaaaagcaatcgaggcattatattataatcgttacttgaaaaaaggtgatgaagtcattaatgctagactcggttactactcagtcgtgaatgaaacgaatgttcaattgttacaaccaaactgggaaattaaagtgaagcatgacggtaaggataaaacgaatacttactatgtcgaagcgacaaataataaccctaaaattattaatcattaatatgaatcgtaataagctagcattgcaagctcatcatatgtgagaagcggtgctagcttttttgctggtacggtttattatggctgatgtttttgcgtctccaacgtgcgcatttattcatattttaagtagaaccgcattgtaaaattagtgtaactgttattttaaaaactttagtatttgtctaatcattgttataataattaagaaattcattgcacgtgattatcaaaatttaaatataagaaaccggtcgatgaactaaagttacataataggaaaggtatacaaaacagctaatatactgatagtttctgtagggaaaatcgtatatttgcactgatgtatattgcagtcatatagagagattgactgtttaaagagaaaggatgagccgcttgatacgcatgagtgtattagcaagtggtagtacaggtaacgccacttttgtagaaaatgaaaaaggtagtctattagttgatgttggtttgactggaaagaaaatggaagaattgtttagtcaaattgaccgtaatattcaagatttaaatggtattttagtaacccatgaacatattgatcatattaaaggattaggtgttttggcgcgtaaatatcaattgccaatttatgcgaatgaaaaaacttggcaggcaattgaaaagaaagatagtcgcatccctatggatcagaaattcatttttaatccttatgaaacaaaatctattgcaggtttcgatgttgaatcgtttaacgtgtcacatgatgcaatagatccgcaattttatattttccataataactataagaagtttacgattttaacggatacgggttacgtgtctgatcgtatgaaaggtatgatacgtggcagcgatgcgtttatttttgagagtaatcatgacgtcgatatgttgagaatgtgtcgttatccatggaagacgaaacaacgtattttaggcgatatgggtcatgtatctaatgaggatgcggctcatgcaatgacagacgtgattacaggtaacacgaaacgtatttacctatcgcatttatcacaagacaataacatgaaagatttggcgcgtatgagtgttggccaagtattgaacgaacacgatattgatacggaaaaagaagtattgctatgtgatacggataaagctattccaacgccaatatatacaatataaatgagagtcatccgataaagttccgcattgctgtgagacgactttatcgggtgcttttttatgttgttggtgggaaatggctgttgttgagttgaatcggcttgattgaaatgtgtaaaataattcgatattaaatgtaatttataaataatttacataaaatcaatcattttaatataaggattatgataatatattggtgtatgacagttaatggagggaacgaaatgaaagctttattacttaaaacaagtgtatggctcgttttgctttttagtgtaatgggattatggcaagtctcgaacgcggctgagcagcatacaccaatgaaagcacatgcagtaacaacgatagacaaagcaacaacagataagcaacaagtaccgccaacaaaggaagcggctcatcattctggcaaagaagcggcaaccaacgtatcagcatcagcgcagggaacagctgatgatacaaacagcaaagtaacatccaacgcaccatctaacaaaccatctacagtagtttcaacaaaagtaaacgaaacacgcgacgtagatacacaacaagcctcaacacaaaaaccaactcacacagcaacgttcaaattatcaaatgctaaaacagcatcactttcaccacgaatgtttgctgctaatgcaccacaaacaacaacacataaaatattacatacaaatgatatccatggccgactagccgaagaaaaagggcgtgtcatcggtatggctaaattaaaaacagtaaaagaacaagaaaagcctgatttaatgttagacgcaggagacgccttccaaggtttaccactttcaaaccagtctaaaggtgaagaaatggctaaagcaatgaatgcagtaggttatgatgctatggcagtcggtaaccatgaatttgactttggatacgatcagttgaaaaagttagagggtatgttagacttcccgatgctaagtactaacgtttataaagatggaaaacgcgcgtttaagccttcaacgattgtaacaaaaaatggtattcgttatggaattattggtgtaacgacaccagaaacaaagacgaaaacaagacctgaaggcattaaaggcgttgaatttagagatccattacaaagtgtgacagcggaaatgatgcgtatttataaagacgtagatacatttgttgttatatcacatttaggaattgatccttcaacacaagaaacatggcgtggtgattacttagtgaaacaattaagtcaaaatccacaattgaagaaacgtattacagttattgatggtcattcacatacagtacttcaaaatggtcaaatttataacaatgatgcattggcacaaacaggtacagcacttgcgaatatcggtaagattacatttaattatcgcaatggagaggtatcgaatattaaaccgtcattgattaatgttaaagacgttgaaaatgtaacaccgaacaaagcattagctgaacaaattaatcaagctgatcaaacatttagagcacaaactgcagaggtaattattccaaacaataccattgatttcaaaggagaaagagatgacgttagaacgcgtgaaacaaatttaggaaacgcgattgcagatgctatggaagcgtatggcgttaagaatttctctaaaaagactgactttgccgtgacaaatggtggaggtattcgtgcctctatcgcaaaaggtaaggtgacacgctatgatttaatctcagtattaccatttggaaatacgattgcgcaaattgatgtaaaaggttcagacgtctggacggctttcgaacatagtttaggcgcaccaacaacacaaaaggacggtaagacagtgttaacagcgaatggcggtttactacatatctctgattcaatccgtgtttactatgatataaataaaccgtctggcaaacgaattaatgctattcaaattttaaataaagagacaggtaagtttgaaaatattgatttaaaacgtgtatatcacgtaacgatgaatgacttcacagcatcaggtggcgacggatatagtatgttcggtggtcctagagaagaaggtatttcattagatcaagtactagcaagttatttaaaaacagctaacttagctaagtatgatacgacagaaccacaacgtatgttattaggtaaaccagcagtaagtgaacaaccagctaaaggacaacaaggtagcaaaggtagtaagtctggtaaagatacacaaccaattggtgacgacaaagtgatggatccagcgaaaaaaccagctccaggtaaagttgtattgttgctagcgcatagaggaactgttagtagcggtacagaaggttctggtcgcacaatagaaggagctactgtatcaagcaagagtgggaaacaattggctagaatgtcagtgcctaaaggtagcgcgcatgagaaacagttaccaaaaactggaactaatcaaagttcaagcccagaagcgatgtttgtattattagcaggtataggtttaatcgcgactgtacgacgtagaaaagctagctaaaatatattgaaaataatactactgtatttcttaaataagaggtacggtagtgtttttttatgaaaaaaagcgataaccgttgataaatatgggatataaaaacgaggataagtaataagacatcaaggtgtttatccacagaaatggggatagttatccagaattgtgtacaatttaaagagaaatacccacaatgcccacagagttatccacaaatacacaggttatacactaaaaatcgggcataaatgtcaggaaaatatcaaaaactgcaaaaaatattggtataataagagggaacagtgtgaacaagttaataacttgtggataactggaaagttgataacaatttggaggaccaaacgacatgaaaatcaccattttagctgtagggaaactaaaagagaaatattggaagcaagccatagcagaatatgaaaaacgtttaggcccatacaccaagatagacatcatagaagttccagacgaaaaagcaccagaaaatatgagtgacaaagaaattgagcaagtaaaagaaaaagaaggccaacgaatactagccaaaatcaaaccacaatccacagtcattacattagaaatacaaggaaagatgctatcttccgaaggattggcccaagaattgaaccaacgcatgacccaagggcaaagcgactttgttttcgtcattggcggatcaaacggcctgcacaaggacgtcttacaacgcagtaactacgcactatcattcagcaaaatgacattcccacatcaaatgatgcgggttgtgttaattgaacaagtgtacagagcatttaagattatgcgaggagaggcgtatcataagtaaaactaaaaaattctgtatgaggagataataatttggagggtgttaaatggtggacattaaatccacgttcattcaatatataagatatatcacgataattgcgcatataacttaagtagtagctaacagttgaaattaggccctatcaaattggtttatatctaaaatgattaatatagaatgcttctttttgtccttattaaattataaaagtaactttgcaatagaaacagttatttcataatcaacagtcattgacgtagctaagtaatgataaataatcataaataaaattacagatattgacaaaaaatagtaaatataccaatgaagtttcaaaagaacaattccaagaaattgagaatgtaaataataaggtcaaagaattttattaagatttgaaagagtatcaatcaagaaagatgtagttttttaataaactatttggaaaataattatcataatttaaaaactgacaatttgcgagactcataaaatgtaataatggaaatagatgtaaaatataattaaggggtgtaatatgaagattaatatttataaatctatttataattttcaggaaacaaatacaaattttttagagaatctagaatctttaaatgatgacaattatgaactgcttaatgataaagaacttgttagtgattcaaatgaattaaaattaattagtaaagtttatatacgtaaaaaagacaaaaaactattagattggcaattattaataaagaatgtatacctagatactgaagaagatgacaatttattttcagaatccggtcatcattttgatgcaatattatttctcaaagaagatacaacattacaaaataatgtatatattataccttttggacaagcatatcatgatataaataatttgattgattatgacttcggaattgattttgcagaaagagcaatcaaaaatgaagacatagttaataaaaatgttaatttttttcaacaaaacaggcttaaagagattgttaattatagaaggaatagtgtagattacgttagaccttcagaatcttatatatcagtccaaggacatccacagaatcctcaaatttttggaaaaacaatgacttgtggtacaagtatttcattgcgtgtaccgaatagaaagcagcaattcatagataaaattagtgtgataatcaaagaaataaacgctattattaatcttcctcaaaaaattagtgaatttcctagaatagtaactttaaaagacttgaataaaatagaagtattagatactttattgctaaaaaaactatcgaattcttcaactacagaaaatatatctatagatatatcaagatttttagaactaagtaatatgatactcttgttagatgatatgctcgacgtcaatatatatataaattcttttaaaaataatacattagagacatttgatgcgactgatcctgaagttgattacatcactgaaataggagattacttattaaaatatgacgttaattctataaatgatgtcagaattgaagtgatagataatttggggcattcaaataatatgctactaaaaacgatactacatgcagaagttgaaatggaagatggaaagaaatatttattacaaaatgggaaatggggttattttaatagagaattttttgaccttttgaatgatcatttgaatgagatagaaattaggtataacacactaactcccacaggtttagtatttaaagaaggagaagaaggatatataaaagaaatagtaggaagattgccagaagaatatttaatgttacataaaaaattcataaaaccaataaataagaattttatagtaaaaggaaatggaatagagttggcagacttatacaatattaaaaacaaagagcttttcacgattaaaagaggaattaatacatctttatctctttatagtctagaacagaatataatagcaattaacgccttaaaatatccagaatcatataattttgaagaattaatagaagctattcctgataactcggaaaatatatttaatgatatacaacggagtacaaattttagtatagtatggattttaccgatatcatctattgataatatgcccataaaagatatggttcatactagtaacgtaataaataaaaactttcaattaactaatttaggttcagtattacttaaaaataaattagtagagtggtctctctatttaaaagatcaaagaattaatccaattatttatatggaaacgccaactgaagatagaaattaaacttttattttaaatcaccctagttcatacctaaaagactttcacacaaacaaaggaggaaacttaaattcctcctttcccttattactcatactataattcaattttaacgtcttcgtccatttgggcttcaaattcatctagtagtgctcgtacttctgcaattgattgtgtgttcatcaattgatggcgaagttcgctagcgcctcttatgccacgcacatagattttaaagaatctacgcaaactcttgaattgtcgtatttcatctttctcatatttgttaaacaatgatagatgcaatctcaacaaatctaatagttctttgcttgtgtgttcgcgtggttctttttcaaaagtgaatggattgtggaaaatgcctctaccaatcatgatgccatcaataccatatttttctgcaagttcaagtcctgtttttctatcgggaatatcatcgttaattgttaacaatgtgtttggtgcaatttcgtcacgtaaatttttaatagcttcgattaattcccaatgtgcatctactttactcatgcgtttgataaaaacttaaataatattaattcggtcatcagtggcgttaaatcttttatcatttttagttatagttgataaatttatatttataagcatatatggatatttcatcaaaaatttttatttatataaatccgaactgcatacatatttgtttaaataagaggtattatttttcgggaaattgctgtctgagttaaaaggattagttttataaaatgagttgaactatagcaaaaacgattaaaatactgataatccatttttgtattatgttagggacttttttacttaattttaaccctattggagcaaatataatactccctattataaggaataaggcgtcatataaagggatataaccttgaataagtttgatgacaaaagcaccaattgaagatataaaagcaattactatactattagcgactacagtattcattggtaatttgaataaaaccaataatataggaataataatgaaggcaccacctgcacctactatacctgaaataataccaatgaaaaggccaatgataactaataaatatttattaaatgaagacttttcggaactaggtttcactttaataaacattaatgttaatgcaagtaaagcaataatgatatataccgtatttacaaatgtagcatcaaataaatttgctagaaatgcacctaacatactccctataatcatgccgccacccatataaagaactaattgtggcgagaactctgttttttttcgagcttttaatgagccacttaatgtactgaaaaagacttggctagaagtaagacctgatgcgatatatgcgctatatgcaggggctccgaataatggtggtaataataaaatagctggataaataatgatagcaccacctacgcctactagaccagatatgaacccaccgaataccccaatgagtaacatgataactatattaacaatatccattacttacttttcaccaataagtttacagcttcattaattaactcttgggagctttcttcatcatccgcagctgcttttacacattctattaaattctcactaataatgatacccatcaagcgttggagtgaactctttgatgcacttatttgtgtaatgacatctttacagtcttttccttcctccatcattttaataattccatttagttgcccttgtattctattaatacgattaatcatttttttatcataattcatagtcatacctccacttttaattgaataaaaatatattaatagataaacacaaatgtgtcaaatacccctagaggtatttgacaagttccatccaactgtttaaaatacccctacaggtatttttagggaggttattatgaaacaatacggagaaaagtttatcgatgaatttagtaaagcagaattggaaaaactagccaagcaagggcaattaattgacgttagaacagaagaggagtatgcattaggacatatcaatggttccatacttcatcctgttgatgagattgagtcattcaataaagaaaaaaataaaacctattatgtaatctgtagaagtggtaacagaagtgctaatgctagtaaatatttagctaaacaaggttataacgttataaatcttgatggtggttataaagcttatgaagaagaaaacgatagttatgatacacaagaagaatataaaagtatagaaattaaagcagatcgtaaacaatttaactatcgtggtcttcaatgtccagggccaattgtaaaaattagtcaagaaatgaagaatattgaagtaggtgaccaaattgaagtcaaagtcacagaccctggattccctagtgacattaaaagttgggtgaaacaaacaaggcatactttagttaagcttgatgaaaataacaatggaattaatgcgattattcaaaaagaaaaagcaaaagatttagatataaattattctgctaaaggtactacaattgtattatttagtggagaattagacaaagctgtagcagcgttgattattgcaaatggtgctagagctgctggaaaagatgtaactatcttctttactttttgggggcttaatgcattaaaaaaagtgcaaacagttaatgttaaaaagcaaggtattgcaaaaatgtttgatttaatgttgcccaaaaagaatatacgaatgcctctttccaaaatgaatatgtttggtttaggaaatatgatgatgcgctacgtaatgaaaaagaaaaatgttgattcattaccaacacttatcaatcaagctattgagcaaaatatcaaattaatcgcttgtacgatgagtatggatgtcatgggtattcagaaagaagaacttagagatgaagttgagtacggtggtgtaggcacttatattggtgctactgaaaatgcgaatcataatttatttatctaattaaatctattaataaaaggagttgttatcatgttttttaaacagttttacgataatcatttatctcaagcatcatatttagtgggttgtcaacgtacaggagaggcaataataatagaccctgttcgtgatttatcgaaatatatagaagttgcagattctgaaggtttaacaattacacaagctacagaaacacatattcatgctgattttgcttcaggaattcgtgatgtggctaaacgcttaaatgcaaatatatatgtgtctggcgaaggtgaagatgcattagggtataaaaatatgccatcaaaaacacaatttgttaaacatggagatatcattcaagtaggcaatgttaaattagaagttctgcatactccaggacacacgcctgaaagtattagctttttactcactgatttaggtggtggttcaagtgttccgatgggattatttagtggtgactttatttttgttggtgatataggtagacctgatttattagaaaaatctgttcaaataaagggttctacagaaattagcgcgaaacaaatgtatgagtccgttcaaaatattaaaaatttaccagactatgttcaaatctggccgggtcatggtgctggaagcccttgtggtaaagcattaggtgccatacctatatctacaataggttatgagaaaattaataactgggcatttaatgaaattgatgagactaaatttattgaatcattaacatcaaatcaaccagcaccaccgcatcattttgcacaaatgaaacaagttaatcagtttggtatgaatttatatcaatcatatgatgtttatcctagtttagataataagagagtagcatttgatcttcgtagcaaagaggcctttcacggtggccacacaaaaggaacaatcaatataccatacaacaaaaactttattaatcaaattggttggtacttagattttgaaaaagatatagatgtaattggagataaatctactgttgagaaagcgaaacacactttacaattaattgggtttgataaggtagcaggctatcgtttgccaaaatcaggcatttcaacccagtccgttcatagcgctgatatgacaggtaaagaagaacatgtattagacgtacgtaatgatgaagagtggaataatggacacttagatcaagcagttaatattccgcatggtaaattattaaatgaaaatattccttttaataaagaggataaaatatatgtacattgtcagtcaggtgttagaagttcaattgcagtgggtatattggaaagcaaaggttttgaaaatgtggtgaatattagagaaggctatcaagattttccagaatcattaaaataatttaaggatgtggaaaaaatgaataagcattatcaaattgttattattggtggcggtacagcaggtgttaccgtagcatcaagactattaagaaaaaatcaaaacttaaaagagaaaatagcaattatagatccagcagaccatcattactatcaaccattatggacgttggttggtgcaggggtatctagtttgaaaagttctcgtaaagatatggaaagtgttatacctgaaggtgctaactggataaaacaggctgtttcaagttttcaacctgaaaataatagcgttattttaggagataatacagtcgtttattatgattttttagtagtagctccaggattacagattaattggtcttcaattaaaggactaaaagaaaatataggtaaaaatggtgtttgctctaactattcacctgactatgttaacgaaacttggaaccaaatttctaattttaaacaaggaaatgccatttttacgcatccaaacactcctataaagtgtggaggtgcgcctatgaaaattatgtatttagctgaagattattttaggaaacataaaatccgttctaacgctaatgtgatatatgcaacgccaaaagatgctttatttgacgtaggaaaatataataaagaattagaaaggattgttgaagaaagaaatataacagtcaattataattataaccttgttgaaatcgacggtgacaaaaaagtggctacattcgaacatatcaaagcatacgatagaaaaacaataagttatgatatgttacatgtaacaccacctatgggtcccttagatgtagtaaaagaaagtacactttcagatagtgagggttgggtagatgttaacccaaccacattacagcataaaagctactctaatgtatttgcacttggtgatgcttcaaatgtacctacttcaaaaacaggcgcagctattcgtaagcaagcacctatcgtcgctaataatttattgcaagtgatgaataatcaaatgttaacgcatcattatgatggttatacttcatgccctattgttactggatataataggttaatacttgcagagtttgattataataaaaatactaaagaaacaatgccgtttaatcaggccaaagaacgtagaagtatgtatatatttaagaaagatttattacctaaaatgtattggtacggcatgctaaaaggattaatataataaagtacagaaaacaataaatttttaatgaaaaatcttttactataaaagattaagtatttaaatgacgtgtcagtgttgtgtttatatgtcgtgaatttttagctctaaatagtataagattgaaaaagttgttactgttttaaatgatcacgatgaagtcattcaataagaatgattatgaaaatagaaacagcagtaagatattttctaattgaaaatcatctcactgctgttttttaaaggtttatacctcatcctctaaattatttaaaaataattaatggtatttgagcacgtttagcgactttatgactgacattaccaatttccatttcttgccagatattcaaaccacgtgtactcaaaatgatagcttggtatgtacctccaatagtaatttcaataactttgtctgttgaacactaagagcaattttaatttcataatgtgttgtaaacattttttttgattggagtttttttctgagttaaacgatatcctgatgtatttttaattttgcaccatttccaaaaggataagtgacataagtaaaaaggcatcatcgggagttatcctatcaggaaaaccaagataatacctaagtagaaagtgttcaatccgtgttaaattgggaaatatcatccataaactttattactcatactataattcaattttaacgtcttcgtccatttgggcttcaaattcatcgagtagtgctcgtgcttctgcaattgattgtgtgttcatcaattgatgtcgaagttcgctagcgcctcttatgccacgcacatagattttaaagaatctacgcaagctcttgaattgtcgtatttcatctttttcatatttgttaaacaatgataaatgcaatctcaatagatctaatagttccttgcttgtgtgttcgcgtggttctttttcaaaagcgaatggattgtggaaaatgcctctaccaatcatgacgccatcaatgccatatttttctgccagttcaagtcctgtttttctatcgggaatatcaccgttaattgttaacaatgtatttggtgcaatttcgtcacgtaaatttttaatagcttcgattaattcccaatgtgcatctactttactcatttctttacgtgtacgaagatgaatagataaattggcaatgtcttgttcgaagacgtgcttcaaccaatctttccattcatcgatttcatagtagccaaggcgtgttttaacacttaccggaagcccacctgctttagtcgcttgaataatttcggcagcaacgtcaggtcttaagattaagccggaacccttaccctttttagcaacatttgctacaggacatcccatatttaagtctatgcctttaaagcccattttagctaattgaatactcgtttcacggaactgttctggcttatctccccatatatgagcgaccatcggctgttcatcttcactaaaagttaagcgtccgcgcacactatgtatgccttcagggtggcaaaagctttcagtatttgtaaattcagtgaaaaacacatccggtctagctgcttcacttacaacgtgtcgaaagacgatatctgtaacgtcttccattggcgccaaaataaaaaatggacgtggtaattcactccaaaaattttctttcataatatatttataccctctttataattagtatctcgattttttatgcatgatgatattaccacaaaagcctaacttatacaaaaggaatttcaatagatgcaaccatttgaaagggaagtctaagagtagtctaaaataaatgttgtggtaagttgatcaatacaaagatcaaggattatagtattaaattgttcattattaatgatacactacttatgaatatgattcagaattttctttggctacttttacagtaaagcgattttttagttatcttataacaaagacaaatttataaaggtgatattatggaaggtttaaagcattctttaaaaagtttaggttggtgggatttattttttgcgatacctatttttctgctattcgcataccttccaaactataattttataactatatttcttaacattgttatcattattttcttttccataggtttgattttaactacgcatataattatagataaaattaagagcaacacgaaatgaatcattaatacgaatgtgattaaacataaaactgaaggagcgattacaatggcgactaagaaagatgtacatgatttatttttaaatcatgtgaattcaaacgcggttaagacaagaaagatgatgggagaatatattatttattatgatggcgtggttataggtggtttgtatgataatagattattggtcaaggcgactaaaagtgcccagcagaaattgcaagataatacattagtttcgccatatccaggttctaaagaaatgatattaattctagactttaccgaagcaacaaatctcactgatttatttaagaccataaaaaatgatttgaaaaagtgaagtagtgaagtgtgggtgcagagagaactaagcccatcgataaatggtcgcttgttaaagaagagtgacggtcactcttctttatgtgcatattttattttgtctgttttgttaacaagcagcagtgtaacaaatatgagtaaggataaaatgagtataatatagaaaccgaatttatcattaatttcattaatccatcttcctaaaaatggagcaattaaactttgcagtaacaatgaaattgacgtccatatcgtaaatgagcgaccgacatatttatctgaaacagtgttcattatagctgtattcatataaattctgattgatgaaattgagtagcctagtataaatgatcctatgaataagtaaaatgctgagtttatccaaataaatagtgctgaatttatgactaatatgaaatataacaaaaatatcaatactttagttgagattttcttcgaaagaatagctgaaattaaacctgcacataatcctccaatgccatataacatatctgaaaaaccaaattgtacagacgaaagttttaaaacattataaacatatcctggtaatgatatgttaaagatcattgtaaacaccattggtatgattgaaataactccaaaaataaatatcatcatgttgtcttttaaaaatttccatcctaataaatattcttgcaataagctatttgttgattcttcctctgaatgagttggtttatctacatgcaatctaaataacataaaaatgctgattagaaacatcattatagtcatcgctataattagagtgaatccatttattttatataatattcctgataatccacctgcaataaacatacctgtttgcaaactaatctctaatagagaatttgcatctgtatattgatctggttttaatatctgtttaactaaacttctagatgttgccatatacgtagtccaacctatcccattaacaatcgcaaatccaatcactaaataggtctcaaatcctatcattacgagtgctatgacaatgagtaaatataatattacctgaagaagataggtgattaaaataatatttcgtctattatatttatcggctagtccacctattataggagaagctaagaaaccggataatacatttaaagctaacataatacctaatagttgggagtcgttagttttgtcgattaaataccaattagccccaactgtactaattccaactccgaatgctgaaattatttctgctaaaaagaacaatctgaagtttttaattttcaacaaatcagtcataaatatcaccttttttcaatgcaagatttatatttgcgagctcttctataaattgagagtcgtttaaaatatcgaatggtttattgccttcgccgatcaaaaatctatagttagtaatattcataaactcaaatattaatttgaattggttgactaaaggttgtgctttggtatgcggattgtcgccacctatgattaaaatcaaatactttttttgtgacatgatttctttgaagttgtctatttgcgtatctcgcaatgactcggtccatctatcaatgaagagttttaaagacgcactcatggagtaccaatagagtggtgttgaaaaaataataatatctgattctaaaactttgattaaaatttgttcgtaatcatcattatgaaagttggcacctttgctatgacgattatctgtaaccttttcaatgttgctttgatataaattcacaaagttgacttttaaattcttcaatagattctctactgcgatagctgaattgccatcttttctactacttccaaataaacaagtaatcatagtcataactcctttcgatttaccttaataataatatttaatatattattattaaatcagaattcttagaattcaggattcgataaaagggaaccctaaaggaggtactactttgaacttaaacattttaaaatcatttttagtaactagtgaaacaaagaaccttactaaagcatcagagttacttaactattcacagtcaactgtatctacacatattgaaaaattagaaaggcaattagatgttaaattattttatagaaaaaaatatggtatggaactaacggaagaaggcttagcatacgttaaatatgctaaagtgattttagatagtaatagcgaatacgagagagaaataaaaggactttacaataagaaggtaaatataagtattaacatgcaagaaagtcagtatttgtatcgctactataataagattagtgaatggttagctgaacacccatatgtaaacttgaagtttaaatccgcacattctaatttctatattaaagaagaaattgctaatttcaaatcggatattagccttatcacagacgaaaagattattaatagtaacttaactgctattcctataactgaagaacgtttaatatttgttactaacaaagagatgaaagatttcaaattaaacgatattcaaaaccatacattacttgttactgaaaaagggtgtagttacagagaacagttagaaatgattttatataaatatagcttttcaacaaaacaaatgattgaatttctaggaattgagtcattaaaaaaacacttgaaaaattcaggtgggattgcgctattgccggaatttattgttgcagatgaattagaaaataaaagtttgtttcaaatagacgtagatgtcgatattccgaatttagaaacaacattgataattaatcctgaatcgaataagcaagtacttgaatcttttgtaaaagatgtttttttataattattggtgaaaacgtgtagttatggtgaaactcaaagataataatttaaatgagatgttaatgaaaaagtaattcaatataaaaacaggtgatttatatctttaataaggattatttctagttgaaatttcaaattgcgggcattcattttcaaaatagtaaagaatttaatagatgaaaacctttgaatcatactagttagtatggattgattaatattttaacctgctaaatgagtagcttatgtattttaaatagctgtcatctagcaggttctttattattaataagttcagataaattattttagtctgtttttctaatgttgataataataactttaaatctgtactttcattgtgagatatatagtacatcataaatttttatatttggattgagactctttggaagattttcaataaatgaatatttcacaaacttccacttatcaggattataaattataatttctgcaactgcattatcgaagattctaaacaattttttgatttctatttcttttagagataaagtagggaaaatgtcgatatattcttcaagcgcataaagactatgtttaacagaatcggttatgttcattgaatatatcacaccaatatttatattttgccatccaaaagaagaaataacattatcataaaatccattgaatataaattcagtcatcccctctgaacttctccataaatataatggtgaataagtatttgtaatgcaattagtagttgtttgacttattaaataagcttttataattaaatttttaaatccatcagtcttataaccatttaatcgaactctatctctaattatttccatattgtaatcactaggcaacttaacatgatattgcattgcatgcatttagcatacccccttttataaaaaggatagcaataataagtaaaatctcatattatccaattgtgatatagttatcataaaaagtgataggtgattaaattgaactttaatgatttggaaatttttataactgtatgtgaagaagcatctatcaataaagctgcaattaaacttagatatgcacaatctaatatatctcaaagaattagcaagcttgaaaatgaattaggtgtagttttgctttttagaaatcaaaaaggtgctaaggcaactaaagcaggcgaagaattcttagcgtatagcaaaaaagtattaagagatacagagactataaaaaataaaatgaaaaataatactatgtctattttatgctcagaactgttatttaattatttatctgagagcgaagaaattatgatgtcgaataactcaattaattttatttctagtggaaatattagaaaagctatagaaaaaaataattatgataaggttatttcattcataaaaattaacgactcaaattatagacttagtaatgttgatactatgaaagtaacgctttacagtaatggaagtaattatgataaagaggctttactaataaataaagatgagttttgtcctttaaggaaaataactttagataataagcttgattcacaacgggtaatggaaattgattcattggcagcaataataaacttagttaaacaaggaaaaggaaaggctttattacctatgacttttgagaataaaagagatatagtacaggacatttctaagatatttgaagttaactactatacttataatcatattatgcatcattaattgaaagttgattgagtttaaattacaggaacgattttaaaagtctagtagttagaatgagcgatgtgacagaaaagaaattatgccttttattttgtaaattcgttgttttaaagtaaaggtccttgtagtataggaaaaagtggatgacttctccgcctttaccaccctttcaagcataatgataactgctaaatattgattatagcaccattgcaaaactaatcattaattgtcatattcaactattttgaaaagtatcaatttcacattatcaaattattgagtatctcaatttattgttatacacaaacagtatttttgttatcatagagttaataaatataataaattaaacaagtaactttacaaaaattagaatgattcaattcaatcataattgtttgaaaatagaggtgagcaggtgaacgatatgttaattagtcttgtaatcccagtttttgctttgttagttattggtggtattatttggatgattatagaaggtatagtacatatttcaaaaaagaataaagcaattgataacttttttaaccaagttaataaagtaagtgagacatataaattcgctactacttttttatttctaatcttggctacggctggtatttctcaattttatctatattatatagtatcagcgtttcttttttggcttgtcatacttacctttggcattgcaggtatcatttttttaatgccatatggattatgttttctaccgttttataagcaaaaaaagaaaaaacagacatttaaaaaatacatggtttacactacgattggtttgtcaatttgtctaggcttatctctagttttggttcacactacgaaaatttatatggacgaaggtggcgtaagatactattacggtagttttgtaatgaaacaagcgggcggttatgcttatttagctttagcggtactttcaacgttgttaattgttgcgaaaaaagctacaaataaaaataaagaaatcgaaaccgtcgacaatacaaatataacggaaagataattaagggagtgctcattcaggagtgctcttttttgatgtccaaatttagttgcaaatgaaggcatagaagaaatttttatagtcatttattggataatgaattatggtcatatcgattaattttattagtgaggattttacaaacatttgttgaataaatatggtaatgataatatatgaatatttttgaaaaaacactaatatgattaaattatttgttaaaatagcattaagtaaaaaacaaatagggaacaaggtgggatttcatgagtcaattgctaaatgatacgttatcggcttggttgttaattgaatctttaagtccaggagaagtaaattttacagcggaagatatactctcagctgaacattttaaaaatggtgcaaagcaagcacaacttcaaagttttgatgaatattttgaaatatggaatgctgaacgctttattatatcagaagaaaaatcagagactggggaacttatatttaaattttatagacattgcttccgctataatgaaattaatttgaaaattcaggatatttttgatgattattctgagattcataatccaaatgggacacactgttatggttacacatttaacacagataaacacggcaaagtgatagttgattctatacatattccgatgattatgagtgcattaaaagaaattgaaaagaacaaaaatgccaatatagaagaaaaatttaatgattctgttgaaaaatttgttcaaaaagtaaaagaaattttagcagatgaaccaattaatgaatttaaattgaagaagatggacaaagcttatgatgagtacttttctgtattaaattcaaagaaagatggattatttggacattatgtagcaatagaatatgtgaaagatagtgatttaccacagccggaatttaacagcttcttcataagtgatattgagaaagcaagaaaatctcccaaccaaactttaattgattacattgaaggtgtagaagaaagtcagcgcatagaagtagatgaaaataaagaaatgtttgacaaatttttacatccttcacgtttgcctgatggacgatggccatcacagactgagtttagattgtctttaatgcaacaacttgctgtaaaccaaattacgagtggtaatgaaagaataagttcagttaatgggccaccaggtacaggtaagactactttattaaaagatatatttgctcatctagtagttgaaagaggtaaagagttagctaaactaaataatcctaaagatgcatttgtcaaaacaaaaattcatgaaacggatgataaatacgtatacttactaaaggaatctattgccaaatataagatggtagtcgcatctagtaataatggagctgttgaaaatatatctaaagatttaccgaaaattgaagaaattataagaaatcccgaaaaatgtaaattccctaaatatgaacagaattatgcaaatttagcacatgaattaaaagattttgctgaaatagctgaagatttgattggtgaaagtgcctggggcttattttctggagtttttggtaaaagtactaatattaaccaagtattgagtcatatgttaaaacaagatgcgaatgatattggctttgctaaattactacaaaatgagaataatcgtatgagttataacgagttaatgagtgaatggcaatcacatcaacgtgcatttttagaagagttgaggcatgttgaaatgttaaaagaagaatctattagagcatatgatgtttataaaaattgtgagtctttctctaagattgaacaggttattaatagtgaaaaaacaagtattgaagaacaggtatatcatttagataatgaaacgttacgagacaataaagaaatagaagatttggataatcgaattaattatattgttaagcaaatagaaactttaaatgagttaattaaatccatcaaagaaagcaacaaaggttttattaacaaactgaaagcgatgtttaattcagaagaagatgaaagctataaagatcataataaagagaagcaacaattattaacacaacagttagagttagagaaatgtaaaaaaaacaaacatgaagaccttgttagcaaactaaaagaaaaagagaaattaattaaacaattaactaaagtacagttgcaattagacgagttaaattcacagttacaagagttagaagcatatcgtattgagtcaaaaattacaattccagaaaaagatttttggagtgacaacaattatgatgagcgccaagttactaatctgtggacgagtgacgaacttcaatacagacgtgccatgctctttttaagagcaatgatattgcataaattattattgattgctaataatacaactatttattatgcgattaatgattttaaagatagaaggaaattaattgatgcaaatccagataaagtacacaacgcatggaatgtgatgcatttaatatttccagtagttagtacgacgtttgcaagctttaaatctatgtatgggggcataccaaaagatttcatagactacttatttattgatgaagcaggacaagcaatacctcaagcagctgtgggagcattatatcgttcaaaaaaagttgtagctgtaggtgatccgattcaaatagaaccggttgtgactttagaaagtcatttaattgataacattcgtaaaaattatcatgttccggaatatctagtttctaaagaagcttctgtgcagtctgttgcagacaacgccaatcaatatggtttttggaaatctgatgctactgatagtaatcaaaaaacctggataggcatacctttatgggtgcacagacgatgtttaaaacctatgttcacgatagctaaccaaatcgcttataataataaaatggtgttgccaagtaatattacaaaagtaggtaaaacaggttggtatgacgttaaaggaaacgcagttcaaaaacaatttgtgaaagagcatggtgaaaaagtagtgggattattagctgatgattggattgaagcaattaaggaaggtaaaaatgaaccgagctcatttgtaatatcgcctttttcagcagtacagcaacagattaaacgtatgttaaagcaacaactaccgactagaattgatattgaacgtacaaaaattaatcaatgggtcgataaatccattggtactgttcatacttttcaaggtaaagaggctcagaaggtgtattttgtaataggtactgataatacccaagatggtgctgtgaactggtcatgcgaaaaaccaaacttgttaaacgttgcagtgacaagagctaagaaagagttttatgtaattggcgacatgcaaagaatacagatgaaaccattttatgagacgatttttaaagaaagaaatgtaaaataacatacaaaaaagtatatagaggaagttatacattttaaaaggagcaaaattgaataatggagaaatttaacaactggatattaaatgcaataagtggatctcaaacagacaagaatgaaacaactgaagaattaaaaggggcaaaatttatcattttatatgcatattcaatgctcgttttgcttgcgttagtaatttctaacatattcattcacattttggagcctaaactatcaatcaccactcaaatcatcatcgttttgattttaattgaagcactaattggactgcgtttcttgaaagcgtacgatgttaagcgtggcaaagataaagaaaataagaaaaatagtaaggatttcgttaaactaaaatcaattttagtagcaattttatttacatcattggcgctgacagcaggtactgtagctgatatatacggtttcactgacttaggaaatactagaagtgatttaatcgtttggagcataggtggtattatatttggcctcgtatgttacacaatggaagataaaagataacgataaggagctggcgattataaagctagctccttttttaacttatatatgtaaagaactatcctaagggtttttaatcatatgtcaataatttctataatacattattaaaacatcaattaaataagttttaaaattttacacatatttttatttaaaaaagatgtataattaatgtattaaatatagaaagaagttgatattatgaaaaagtgtattaagactttgtttttaagtatcattttagtagtgatgagtggttggtatcattcagcacatgcgtcagattcgttgagtaaaagtccagaaaattggatgagtaaacttgatgatggaaaacatttaactgagattaatataccgggttcacatgatagtggctcattcactttaaaggatccagtaaaatcagtttgggcaaagactcaagataaagattaccttacccaaatgaagtcgggagtcaggttttttgatattagaggtagagcaagtgctgataatatgatttcagttcatcacggcatggtttatttgcatcatgaattaggaaaatttctcgatgatgctaaatattacttgagtgcttatccaaacgaaacaattgtgatgtctatgaaaaaggactacgatagcgattctaaagttacgaagacatttgaagaaatttttagagaatattattataataacccgcaatatcagaatcttttttacacaggaagtaatgcgaatcctactttaaaagaaacgaaaggtaaaattgtcctattcaatagaatggggggtacgtacataaaaagtggttatggtgctgacacgtcaggtattcaatgggcagacaatgcgacatttgaaacgaaaattaataatggtagcttaaatttaaaagtacaagatgagtataaagattactatgataaaaaagttgaagctgttaaaaatttattggctaaagctaaaacggatagtaacaaagacaatgtatatgtgaatttcttgagtgtagcgtctggaggcagcgcatttaatagtacttataactatgcatcacatataaatcctgaaattgcaaaaacgattaaagcaaatgggaaagctagaacgggttggctgattgttgactatgcaggatatacgtggcctggatatgatgatatcgtaagtgaaattatagatagtaataaataaggattcaataatgatattaagacgagtatgaaaatagttagattctaattattttcactactcgtttttattttgaaaataagtaataattcaacaatattataaattgaacagattgtttgtgaaatttttgataatattaaagtgaaaaagtgttataaattgataaatatatgtaattaacaaaaacaaatcattttaaaaagaagagagttgtaagatgatgaaacgattaaacaaattagtgttaggcattatttttctgtttttagtcattagtatcactgctggttgtggcataggtaaagaagcggaagttaagaaaagctttgaaaaaacattgagtatgtaccctattaaaaatctagaggatttatacgataaggaaggctatcgtgatgatcagtttgataaaaatgataaaggtacatggattataaattctgaaatggttattcaacctaataatgaagatatggtagctaaaggcatggttctatatatgaatagaaataccaaaacaacaaatggttactactatgtcgatgtgactaaggacgaggatgaaggaaaaccgcacgacaatgaaaaaagatatccggttaaaatggtcgataataaaatcattccaacaaaagaaattaaagatgaaaaaataaaaaaagaaatcgaaaactttaagttctttgttcaatatggcgactttaaaaatttgaaaaattataaagacggagatatttcatataatccagaggtgccgagttattcggctaaatatcaattaactaatgatgattataatgtaaaacaattacgcaaaagatatgatataccgacgagtaaagctccaaagttattgttaaaaggttcagggaatttaaaaggctcatcagttggatataaagatattgaatttacgtttgtagagaaaaaagaagaaaatatatactttagtgatagcttagattataaaaaaagcggagatgtataatcatggctcaatcagaatatgaaatcaatcccggaaaaagagagtgatgaaatgataaaacgtgtaaataaattagtgcttggtattagtcttctgtttttagtcattagtatcactgctggttgtggcatgggtaaagaagcggaaataaagaaaagttttgaaaaaacattgagtatgtatccgattaaaaatctagaggatttatacgataaagaaggatatcgtgatgatcaatttgataaaaatgataagggaacatggattgtaaattctcaaatggcaattcaaaataaaggagaagctctaaaaataaaaggcatgcttttgaagatagatagaaatacaagaagtgcaaaaggattttactatactaatgaaataaagacggagaaatacgaagtagctcaggataatcaaaaaaaatatccagttaaaatgattaataataaattcatttctactgaggaagttaaagaagaaaacataaaaaaagaaatcgaaaactttaagttttttgcgcaatatagcaattttaaagatttaatgaattataaagatggagatatatcatataatccagaggtgccgagttattcagctcaatatcaattaactaatgatgattataatgtaaaacaattacgtaaaagatatgacataccaacaaataaagcgccgaagctgttgttgaaaggtacagggaatttaaaaggttcatcagttggatataaaaaaattgaatttacttttttagagaataaaaatgaaaatatttactttactgatagtctacatcttgaaccgagcgaggataaataatcatcttttaaccagaatatgaaatcaatctaggacaacctaataaaaggagagagttgtaagatgatgaaacgattaaacaaattagtgttaggcattatttttctgtttttagtcattagtatcactgctggttgtggcataggtaaagaagcgaaaataaagaaaagttttgagaagacattgagtatgtatccgattaaaaatctagaggatttatacgataaagaaggttatcgtgatgacgaatttgataaaaatgataaaggtacatggattattggttctgaaatggcaactcaaaataagggggaagctctgaaagttaaaggtatggtcttgtatatgaatagaaataccaaaacaacaaaaggatattattatgtaaatgcaataaagaatgataaagacggaagaccccaagagaatgaaaaaaggtacccagttaaaatggtcgataataaaatcattccaacaaaagaaattaaagataaaaacataaaaaaagaaatcgaaaactttaagttctttgttcaatatggaaactttaaagatttgtcgaagtataaagacggagatatttcatataatccagaggtgccgagttattcggctaaatatcaattaactaatgatgattacaatgtaaagcaattacgtaaaagatatgacataccaacaaataaagcaccgaagttgttgttgaagggtacagggaatttaaaaggttcatcagttggatataaagacattgaatttacgtttgtagagaaaaaagaagagaacatttactttagtgatgggttaatttttaaaccaagtgaggataaataatcatgactcgatcaaaatatgaaatcaatccaggaaagataataagaagaataggattgtgaaattatgaaacgattaaacaaattggtattgtatattagttttttgatattagtcattagtttcactgctggttgtggcataggtaaagaagcggaagttaagaaaagctttgaaaaaacattgagtatgtatccgattaaaaatctagaggatttatacgataaagaaggttatcgtgatgacgaatttgataaaaatgataaaggtacatggattattggttctgaaatggttgttcaacctaaaggggaacgtatgaaatcaaaaggtatggttctatatatgaatagaaacactaagactacaaccgggaagtatatagtgagtgaaacacttcatgatgaagatggtagacctaagagtaaagataaagaatatcccgttaaaatggtagacaataaaatcattccaactaaaggtatcaaagacgaaaatataaaaaaagaaatcgagaattttaagttcttcgcgcaatatggcagctttaaagatttgtcgaagtacaaagacggcgatatatcatataatccagaggtaccgagttattcagcaaaatatcaattaactaatgatgactataatgtaaaacaattacgaaaaagatataaaataccaacgaataaagcaccaaagttattgttgaaaggttcgggagacttaaaaggttcatcagttggatataaagacattgaatttacttttgtggagaaaaaaggtgaaaatactttttttactgatagtctacatcttgaaccgagtgaggataaataatcatccacacacacgattcaatatgaaattcaaatatgttgctgtaaaataatgtaaaataaacgtattcatattactgaattgagggatagtatgcaacgtgattatttaattcgagtagaaactgagagtatgtcagatttcaaaaggctcaatagtttaatgattggttttgttattaaaggtgaggcacacatttatgatgaaaataatatgacgcaatgcaacagtggcgacattttcatcattaaccaccgcgacttgtatcgatttcaacttcaacaagatggcatcatatgttatatccaattccaaatgaaatatttagcagacaagtttgatgatgtgcattgtctatattttcacttaacagatgcgaccacaacaaagaatatacatcaactgagaaatataatggcaagactggtttcaacacatatccgacataatgagttgtctaaattgactgagcaacaacttgtgattcagttgcttatgcatatgattcattatgtcccgcgtacatatcattcgaaccaaagtatcttaaatgatgataaagtgaatcaagtatgcgactatatcgagttacattttcatgaagatttaagcctttcagaattaagcgaatacgttgggtggtcagagagccatctgtctaaaaagtttacagaatcgctaggtgtaggattccatcatttcttaaatacgacgcgaattgagcatgcgaaactcgatttgacatacacagatgaaaccattactgatattgcattgcaaaatggcttttcaagtgcagcgagctttgcgagaacatttaaacactttacgcatcaaacacctaaacaatatcgaggtgatcgtccagcaatcactgaaaaccagcaatcggcacaacatgattatcacgaccgtgaattgatattacttttaaatgactacattgaagaaatgaatcattttattgaagatattgaaaagatgaactataaagagattgcctttcaaccaaccaatcaccaactaaatcaatttaatcatattattcaagtgggctatttgaggaatttgctcaatacacagtatcaatcacagttgcttacatgtcatcatgattttcaagtcaatgaagtattagcatatgatgtgattccatatatcatgaaaaagctcaatgcgccattcacgtatgatgcagaaatttcgaatatattttatgatattgatttgtgtttagactttttattagatcataactttagtttgaccatgcatttggatcagtatgactcacgtgattatatcgatgcatttaaaatttttatccatcacgttgccctgcatgtcagtcatagaaaagatttgaagttcaacttgtatgtgacgacattgcacacgtctttgattgaaatgattgattattttaaagcattattccctaatggtggcttgtacattcacttagatcaagctacggaaagacatctaccattattgaaacgacttgagccacacatcgaccattttgtatttgatgccaattcaaatgacgctgttgattttaataaaatgaatgatgatgaatttaaaaccgcgagtcaaatgattattaataaaacgaattaccttatcgacttaatgcatcgtcatcgcctaaagcgtccactcattttactcaattggaatacattgacgggtgatacatttattacaaacggcgaatattttagaggtggtatcatcattgagcaattattaaaattaagttctaaagtagagggtatcgggtattggttgaattatgatttgcacgtcagtcattgtaaaaatgaacgggattatatgaattctattgaactatttcatcaatataatggaaaacgtccggtctatttcacggcattgctatttaataaattaacaagcaatattttgtattctgatgatacatgtattgtcacggggactgattcaaattttcaaatattgttatatgatgcaaagcattttaatccgtacttagcgttggacaatcaaatgaatatgcgtgcgacggaaatgattcatttgaacattaatgccctggaagaaggtatgtataagattaaacattttaccttagataaagaaaatggtgcgttatttaatctttggcgcaaacatcatacgatacatggcatggacaaggactctatagattacgttaatcgaatgagttttccgaaattagaagtatatgatatagatatcacggacacactggcattaaacattaaaatgattacgaatgggattcacttaattgaagtaaaacgttacccaagttcataaaatgatcacaaatcacaaattttgatatacataatttgtgattttttatattcaaagctaaaattgcaaaaaattaatggttaacatctctgttgttggcaatataaataatgattaatcatttatgatgtaactaaggagatgaaggatatgaatcaacaattaattgaaactttaaaatctaaagaaggcaaaatgattgagatcagacgttatttacatcagcatccagaattatcttttcatgaagatgaaacggcgaaatacatcgctgaattttacaaaggtaaagatgtggaagtagaaacgaatgtcggaccacgtggaattaaagtaacgattgattcagggaaacctggtaaaacattagcaatccgtgcagactttgacgcattacccattactgaagatacaggattatcttttgcatcacaaaataaaggtgttatgcacgcatgtggtcacgatgcacatacagcatacatgcttgtattagcagagacgcttgctgaaatgaaagatagttttacaggaaaagtcgttgtgatacatcaaccagctgaagaagtaccaccaggtggtgctaaaacaatgattgaaaatggtgtattagacggtgttgatcatgtattaggtgtacacgtcatgagcacaatgaaaacaggtaaagtgtattacagacctggttatgttcaaacaggacgcgcattcttcaaattgaaagttcaaggtaaaggtggtcatggttcatcaccacatatggccaatgatgccattgttgcaggtagctacttcgtcacagcgttacaaacagttgtatctagacgactaagtccatttgaaaccggtgttgtcacaatcggttcatttgacggtaaaggtcaattcaatgtcattaaagatgttgttgaaattgaaggtgatgtacgtggattaacagatgctacaaaagcaacaattgaaaaagaaattaaacgtttatcaaaaggattagaggatatgtatggtgtaacttgcaccttagaatataacgatgattatccagcattatataatgatccagagtttactgagtacgtggctaagacgttgaaagaagcaaaccttgattttggtgttgaaatgtgtgaaccacaaccaccttcagaagactttgcatattatgctaaagaacgcccaagtgcctttatttatacaggtgcagcggtggaaaatggtgaaatttacccacatcatcatcctaaatttaacatttcagaaaaatcattacttatttctgcagaagcagtagggacagttgttttagattaccttaaaggagataactaacatgaatgaaacgtatcgcgggggcaacaagttaatcttaggtattgtattaggtgttattacattttggttgtttgcacaatcacttgtaaatgttgtaccgaatttacaacaaagttttggtacagacatggggacaattagtattgcggtcagtctaactgcactattttcaggcatgtttgttgttggagcaggtggtctggcagataaaattgggcgcgtgaaaatgacgaatatcggtttattattaagtattattggttcagcattaattattattacgaatttaccggcattattaattttaggtcgtgttatacaaggtgtatcagcagcgtgtattatgccttctacattggccattatgaaaacttattatcagggtgctgaacgtcagcgtgccttaagttattggtctatcggttcttggggtggcagtggtatctgttcactcttcggtggtgcagttgcgacaactatgggttggagatggattttcatcttctcaattatcgttgccgtactttcaatgttactcatcaaagggacgcctgaaacgaaatcagaaattaccaatacacataaatttgacgttgcagggctaattgttctagtagttatgttgctaagtttaaacgttgtcattactaaaggtgcagcacttggttacacatcattatggttctttggtttgattgcaatcgtaattgtagcattctttattttcttaaatgttgagaaaaaagtagataatccacttattgattttaaattatttgaaaataaaccatatacaggtgcaacgatttcgaacttcttattaaacggttttgcaggtacattaattgtagcgaatacattcgtgcaacaaggtttaggttatacagcattgcaggcaggatacttatcaattacttatttaatcatggtgttattgatgattcgagttggtgaaaaattattacaaaaaatgggttctaagcgaccaatgttattaggtacattcattgtggtcattggtattgcacttatttcattagtattcttaccaggcatattttatgttatcagttgtgtcgtaggatatttatgtttcggactaggcttaggtatttatgcaacaccttctacagatacagctatttcgaatgcaccgttagataaagttggcgttgcttcaggtatttataaaatggcttcatcacttggtggcgcattcggtgtcgcaattagtggtgctgtatatgctggtgcagttgctgcaacgagcattcatacaggtgcgatgattgcactttgggttaacgtattaatgggaatcatggcatttatcgcaattttattcgcgattcctaatgatgataaacgtgtcaaagatgcgaaataataacgatgacacgccaagtgttttgataatgatataaatgaaagtaaagcaaattaaatgaggaaatgtatagagcagtgcatatagataaatctatgattggattaacactaatataaatataaatgaaaatgaaaaaccatccacttaaatttttgataagttaggtggatggttatttattgcgttgttctaaaaatttggacatttatatggaaagaactatatataatgtgaaggttatggcaattcgcttcaatgaaggcgacgtgtaaaagtgtatattaaacgtttcggggtcagactccgagaacagtgtccgtcatgcttaccgcatactaatgaagcattattatatcagtgtttatagccgatttaagataataaattttgctaaacaaaaaagccaacccatgaatgttggattggctttttacatgcatctgaatctctaattttaaaaaaatatgaatataaataagacagtaaaaattaaatttcagttgttgcaatttcttcatctgtaggtacatcatcgttaaggccaacaagtgcttcagaaacatttcgtgaatgataaccgatacgttcaagaacaccaatcatatcgatatatagtaatccgccttttgttgtacattcaccacgattaaggcgtttaatatgacctttgcgtagtttatgttcaatattaaatgattctctactacgttctacaatttcatcttttttcgttttgtcataaacatctaacatgtcgatggctttatcaaatgactcagcaacatggttgaataatttatccataccgcgttgtgcatcttctgtaatgcgaatatcttcatcatgttggcgttttaattgagcgacatactcttctgttagctctgctacttttaaaatagagcgattgacatcaaacataactgctaaacgctcaacgtctgccttcgtaatggcttttgtagaaattctaactaaataatttcgaatgctatcattgattgtttcaacagcttgatgcttttgttcaagctttttgatcaattttttatcgtcttttgtaatttcgcgaatgtcttcaaacattgataagacaatctgacccacattttgtaattctttttgagtttcttgtaatgcaacaccaggtgcgtgataaacaagatctttgtttaagtgctgaggtttatagtcatcagcaatatctttacctgggacaagctttgtaacaatccatgctaaacctgctacaaatggtaattgaatcaaagtatttgttatgttgaagataccatgtgatactgcaatcgtcatcgctggttttaagtgccataaatcttgtaacaaactaatcaaatgaatcacaactggcaagaaaattgtgaagataattaccccgattaagttaaagatgacgtgtacaagcgccgcacgttttgcagcgattgagccggctaaactagctaagatagctgtaatcgtggtaccaatgttatcgcctagtaacacagggattgctgcgtttaagctaattaaatcttgttgataaaattcttgtaaaataccaatcgtcgcacttgaactttgaactagtgctgttaaccctgcgccgacaatgacagcgagtattggatttgtagacatatcaagcattaattgcttaaatccatctaatgatgctaaaggtttaacggcatcacccataaattctagaccgaagaatagtgaaccgaaaccgaatagtatgcggccaatgttattgattttagagcgtttaaagaaaaagattaagaatgcacctaatgctaaaattggcattgcatattcgcctaaatctataccgataataaatgcagttaccgttgttccgatattagcacccattatcactccaatggcttgtttcaatgtcataaatccagctgttaccagtccgattgtgataactgtcgtacctgaactactttgtattaaaatagttacaacgatacctgcaataacacctaatactggatttgatgtaaatttgtttaaaatatctcgtagcctgtctcctgctgatgcttgaagcccgtctcccatgatttttaagccgtaaaggaaaatacctaaaccacctaaaaaggagaaaatgacttctgtaaccgacatttccattatttcacctcaaataagctttatatttagattatcgcttataattgtaaatttaatgttaagattaggtaaaattatttaacaatatatgttatttgtatatgacttgtaaaatatcgtcacttattatgtaaattttcagtgtgaaatggcaggtttgcaatcacttgtttaacaaaatgatgcaatcaatcatgtaattatgtttcatcaaaaaaatcatgagagtggaacaacgaaataatttttatgaaaacatcatttctgtcccagtctcatgatttgaaatcaccaaataaaaatctattaatggttttcgttataacaatttgtgttcttttaataatgactcaatgtacgtaccttttatctttttaaggaatcctgctaatgcgagtttttgcattttcgaatctttagtaatctcacgcaaatcttggtggtcattcagttcgtatatggcatccattaagacgcgaagatcaaatggactattgatgacttctggaataccacgatctatatttagtaattgataaacagcttccatggcagtacgaaccgaatattctgttgtaaatacagtgtctcgctctgtttctgcaaagttaccaataaatgctaagttctgagattgatgcgggacgactaaaggtctgtcgccgatagcacgcgtcatgaaataagatgtgatatatggcatataaacaggaatcgtattagatgcatgttttgctaagtcttcaattttgtcagttgatacacctaagtgatacagccattcttggcatatttcattaccactacattctgtaattggctttttaatataatcgccgtttacatctgaatataaggcataaatccatgtagatatttcattttcaggttggtctttaaactgttgctgacgattgattgtaaaactcatttgccatgcagaatcattgattgtaataataccgcctgtaactgttttgcctgcaagtgggtcacgtttacaaatactttctattgtatcgataatctctttattgtttgttgtagaagttgctgaaacaaaccaactttttttaggaatattttggcaaaacttatcaggattaccaaattcaggactttgtcgcgctaaatttttccatagtgtccaactaccacctaattcgtcagttggtggcgctggtgtatcattatcaccataagtagagctttctgtaatactaccgtttgtcacaaagacaagatcgtttatagtcagtttaatagattctgcattaccattacggtcaattaatatttctcgggcaattttttgacttgtcgtaacatctattttaatatcttcgacttttacatcgtattcaaattgaaccccatgcgattttaaatattcaaccataggtaatactaaagattcatattgattatatttagtgaattttaaagctgaaaagtctgcgagaccactaatatgatgaacgaatcgcattagatagcgacgcatttccattgcagaatgccacggttcaaatgcaaacatcgttttccagtaaatccaaaagtttgaattaaagaagtcatcggaaaatacatctgttattttgacatcatctaaatcttcttcattcgttaagcataaatctaaaatttctttaatcgccgttttagtcaaagtgaagtctccgtctgtgactaaacgttgaccctgtttctcaataacacgacagcgagaatagttagggtcttctttgtttagccaatagaactcatctaatacagacgcgttatcgatttctaatgaagggatagatctgaataagtcccacaaacattcaaagtggttctccatttcacgaccaccgcggacaacatagccttttaaaggcatattttcaccatcaagactaccacctgctttaggtaactcttctaaaatatgaatcttcgaaccttccatttgaccatcccttattaaaaaacaagctgcagcaagtgaagctagaccagatccgattaagtaagcggatttgttttctacattttcaggttttttagggcgcgcaaatgcttcataatttccataactgtaatacatatccaccaagtcctttcgtattagaatacactcagactatacccctttgtgaattgcaaatattagtatttatattggtaaatttgacgaaattagatcatttttatatttttgatttttaaaattttatcactcgaatgtttttggattctgaggtgcgggacttggaataattatgtattttgaaagaagttacttaaactaacgcctagtagagtgataattccgcctataatagcaagggttgttggtagctcgtctaataacagataagataataataaagaaacgataggtgttaaataaagagacattgttgcatcagagacaccaactgacttcacaatataagcaagcaaaacgtatggaattatagtagggaatatagctaaataaagtaccgatactattgatgtaaaagtggcgccgtgtatatcgttgatgatttcaggaataaaaataagcataaatggtgagcttgccattattgtatatagtgtgaaagcgatgaagccgtatttttctatgtattttttctggaaagtaaaatacaaactttcactaaaagatgcaagtaaaataataaaaacacctaatacattaatagttgtgtaatcatctttacttattgaaataatggatattcctataaatgcgacgagtgaacttaaccaattccattttgaaaaatgctcttttaaaaatatataagctaaagcactagaaaaaataggcgttgtagagactagaattccagatatacctgcactaatcaaagtttcaccaaaatttaaagctgtgtgatatatcacaaatccacaaaatcctaaaataaaaataacagggatatctcttagttcaggggtaggcaatttctttataattacgaacggcaagagaattattgttgctaaaattaaacgaaatgccgacaatgattctgcactaaaatcatttaacgcaatctttatcattggaaatgcagatccccacaatatgatagtaaataaatatgatagaaaagtagtgtctcgaagtttattcattaatatcatcactcctttaattatgtgtttctatattaaaaaatatgatttaaaatgagtacaaccaattttgaatggatttacctatccaattttaaaagggagggagaagatggctaaatataaagatattgctagtgacataagagataaaataatcacaggggattggttttatggaatgaaaataccttcacataggcagttggcgatacagtacaacgtaaatagagtaacgattattaaaagtattgagttattagaagctgaaggatttatctatactaaagtaggtagtggaacatatgttaatgactatttgaatgaagcacatattacaaataagtggtctgaaatgatgttatggtcctctcaacaaagaagtcagtatacggtgcaattaattaataaaattgagacagatgattcgtatatacatataagtaaaggtgaattgggtatatcgttaatgccacatattcaattgaaaaaagccatgtctaatacagccagtcatattgaagacttatcttttggttataataatggctatggttatatcaagttaagagatattatcgttgaacgaatgtcaaagcaaggtataaatgtaggtagagaaaatgtaatgatcacttcaggcgctttacatgccattcaacttttatctattgggtttttaggtcaagatgccataataatttcgaatacaccatcatatattcactctacaaatgtttttgagcaattgaattttagacatattgatgttccttataatcaaattaatgaaattgataccatcattgatagatttattaattttaaaaataaagcgatttatatagaacctaggtttaataacccgacaggtcgttctttaacgaatgagcaaaagaaaaatataattacttatagcgaaagacataatattcctatcattgaagatgatatctttagagatattttctttagcgatccaactccttctatcaaaacttatgataaattgggaaaagttatacatataagcagtttttcaaaaacgattgcaccagcaataagaataggttggattgttgcttctgaaaaaataatagagcaattggcagatgtaagaatgcaaattgactatggatccagtattttgtcacaaatggttgtatatgagatgttgaaaaataagtcttatgataaacacttagtaaagttaaggtatgttttaaaagataaacgagactttatgttaaacatcctcaataatttatttaaggatatagcacattgggaggttccaagtggaggttattttgtatggttagtctttaaaatagatatagatattaaatatttattttacgaattgttaagtaaagaaaaaatattaatcaatccgggttacatttatggcagtaaagaaaagagtataaggctatcttttgcctttgaatcaaatgaaaatattaagcatgcgctctataaaatttatacatatgtgaaaaaggtttaattaaaacaataattcgaatcattatgtggcatgttaaacagctaaatataagctatgcacatttaacaagcggatactcctgacgcaattatagtatcattacatattgtttaatcgtttggggtaatgtaattaaaaggtaaaataggcagagtgttatacataaaatgtaaagaaagaggcgatagaatgtctaaaatcaggtcttttacaatattaagtctacttatttacttagctatgatgtgctatacagtagtgacctatccaaaattaccaaccaaagtgcctattcattataatttagcaggggatgctgataattttgctgataaatgggtgctgcttttgattaatagcgcatttatagtgatttggcttatatttttcattgcaggtagatactatgaacgatttgccaaatggtcacattataatcatacaccacgtgaaattcgagcgattaaattatttttaagtacgttaaatttagagattatgagctatatgtctatcttcacagtattagaaatttggcaaatacaacaccatcatcaattcaatttactatggtttaatatgatatttatcattatcattggtttgacgcttgtcatattttgtttacttcctacaattcataaaatgagagattctcaataaaaatataaactctcatgatgcagttttgaagcgaattcctgagattattataaataatatctagtatttataattaaaatgatatattatttattatagttaaatattgtgtatattttgtgaactttttgtaaaaattcgattgcctgtcacatataggagtgttacattttaaatatgtgatcatcgcaaaatataagttgaaataggttgtagattaatcagaatgataaatattttatataaagagagggagtcattatgacactacttactgtaaatccattcgataatgtcggattatcagccttagttgcagcagtacctattattttatttttattatgcttaaccgtttttaaaatgaaaggcatttatgcagcattgacaactttggttgttacattgattgtggctttatttgtatttgaattaccagcgcgtgtatcagcaggtgcgattacagaaggcgttgttgccggtattttcccaataggatatatcgttttaatggcagtttggttatataaagtttctattaaaacaggacaattttctattattcaagatagtattgcaagtatttcagtggaccaaagaatccaactattattaattggattttgtttcaacgcatttttagaaggtgcagcaggatttggtgtgccaattgcgatttgtgcagtattattaattcaacttggatttgaaccattaaaagcagcgatgttatgtttaattgctaatggtgcggcgggtgcctttggtgcaattggtttaccagttagtattattgatacgtttaacttaagtggaggcgttacaacattagatgttgcgagatactcagcattaacacttccaattttaaactttattattccatttgttttagtattcattgtagatggtatgaaaggtattaaagaaattttacctgtcattttaacagtgagtggtacatatactggattacaattattattaacaatattccatggtccagaactagcagacattattccatcactagcaacaatggtggtgttagcatttgtttgtcgtaaatttaaaccgaaaaacattttcagattggaagcgtctgaacataaaattcaaaaacgaacgcctaaagaaattgtctttgcttggagtccgttcgtaattttaactgcctttgtattagtatggagtgcaccattcttcaaaaaattattccaacctggaggtgcacttgaaagtttagtaataaaattgccaattccaaatactgtgagtgatttatcgcctaaaggaattgcgttgcgtctcgatttaattggtgcaactgggacagcgattttattaacagtaattattacaattttaattacgaagttaaaatggaaaagtgcaggtgctttattggtcgaagcaattaaagaattatggttaccgatccttacaatttcagctatcctagctattgctaaagttatgacatacggtggtttgactgtagcaattggacaaggtattgctaaagcgggagcaattttcccattattctctccagtattaggttggattggtgtgtttatgactggttcagttgtaaataacaatactttattcgcacctattcaagcgacagtggcacaacaaatttcaacaagcggttcattacttgtggcagctaacactgcaggtggtgtagcagcgaaacttatttcaccacaatcaattgccattgcgactgcagctgttaaaaaagttggtgaagaatctgcattattaaaaatgacgttaaaatacagtattatatttgttgcttttatttgtgtttggacgtttatactaacgttaatattctaaatataaataatgttgtcacttggattcaaatgacattttaaatctaattattcatgaatcgaactagtacgaaatgcaatgagcatcttgtctagttcgattttttaatgcctaaaaatgtcatatatgtaatcagagtagaaagtgttgaggcgtttcagaagttgtttagaaaagtaagtaaaataaaaaatgcactgagcaacaaaagatgttgctcgtgcatttagatgattcttatcatttcaaataagaatgtgttaatcaacgtatataagttaaaattggtttggataaaatgatatctatcgttgtgtattgtttgtttttatagttcgcgacgacgtccagctaataacgctgcacctaaggctaatgataatccaccaaatacagttgtaccgatgaatggattttcttcaccagtttctggtaatgcttgagctttgttagcatctgcatggtttgctggttgcttcttatcaacaacaagttcttgaccaggtttgatcatgtttttatcagctaatttgttatctgcagcaattttgtcagcagtagtgccgtttgcttttgcaatgtcatttactgtatcaccaggtttaacgacatgtactccgttaccatcttctttaccaggtttgttgccatcttctttgccaggcttgttgccgtcttctttaccaggttttttgttgtcttctttaccaggcttgttgccatcttctttaccaggttttttgttgtcttctttaccaggcttgttgccgtcttctttgccaggcttgttgttgtcttctttaccaggcttgttgttgtcttctttaccaggcttgttgttgtcttctttgccaggcttgttattgtcttctttgccaggcttgttattgtcttcctcttttggtgcttgagcatcgtttagctttttagcttctgctaaaatttctttgctcactgaaggatcgtctttaaggctttggatgaagccgttacgttgttcttcagttaagttaggtaaatgtaaaatttcatagaaagcattttgttgttctttgttgaatttgttgtcagcttttggtgcttgagcatcatttagctttttagcttctgctaaaaggttagcgctttggcttgggtcatcttttaggctttggatgaaaccattgcgttgttcttcgtttaagttaggtaaatgtaagatttcatagaaagcattttgttgttctttgttgaatttgttatccgctttcggtgcttgagattcatttaactttttagcttctgacaataggttagcactttggcttgggtcatcttttaagctttggatgaaaccattgcgttgttcttcgtttaagttaggcatattcaagatttcatagaaagcattttgttgttctttgttgaaattgttatcagctttcggtgcttgagattcgtttaattttttagcttcacctaaaacgttagtgctttggcttgggtcgtctttaagactttgaatgaagccgttacgttgcgcttcgtttaagttaggcatgttcaagatttcatagaaggcgctttgttgatctttgttgaagttattttgttgcgcatcagcttttggagcttgagagtcattaagtttttgagcttcacctaaaacgttagcactttggcttggatcatctttaaggctttggataaaaccattgcgttgatcagcatttaagttaggcatatttaagacttgataaaaagcattttgttgagcttcatcgtgttgcgcagcatttgcagcaggtgttacgccaccagatataagtaatgtacctaaagttacagatgcaatacctacacctagtttacgaattgaataaatgtttttctttttcaaattaataccccctgtatgtatttgtaaagtcatcataatataacgaattatgtattgcaatactaaaatctatatttataattaaatttaaaggtaagttttacaacttataaaataaatattttgctgaaagatttattcaggaagtaaaaggcttaaaaccgcaaaatcacgctatttcgattaataaaaacagataaaatatagagatattttttataatgaaagcggtttaatacatatgagttaaaaaatatttttaagaataaagtggggctttgaatgtgctgaggtttaatttcggaaatggttttaagtgatatagaaaatagaaagttgttcattatgtgctgaggttttattaaaaaatagaaaacacaagtgcactttagaatacagcacacttgcgtaatagagatattattcaaaaacaagatgtaaatgatctttatctgctaataattgattcacttgagctaataattgttcagcatggtcttgctgcgcgtcatccatatgaattaaaatttttctttcatcttcagttgagcgttcttttattagatagccttgcttttttaaattattgagagctctaacagtttgagggtatttatggtggattgtttcaattaaatctttaagaagaacgatgtttttattttgagaagtgataatagctagaattgtgaattctacaaaacttaatgttagatgttttttgataatattcttgaaatacattgtatacatcatcaagtttagaaattctttactatcttttggtatcatctgtgattcactttgatctgcaaggttaaattgtttaatgatttgatcaaacaatgtaacacgttctgcaattttctctcgttgttcttcagatattgaaatgtaagtattacgctcatcaattttacttcgaactttactaatatatgaatgtttcacaagtacttttatatgctgtactaaatccgattgtttataacataaatctgaaacaatcttcttaaatggaagtgtgttttcttgctgatgaaataaataagtcagtaatataaattcttttatagtcatatcgacttcaggcttgacttttttcttaaaacgaaacatatatgcttcaatgattataaaatctctaattttgtcatggttattatatttcattgttttatctccttgtatatgcactttattttaatataacacaatataataagaaaaataatccataatttacaattaaaaataatatgatatttttattaaaatttgtgtttttgaataaatgacattatcaaacactatatttaaataagaaatagttatcgatatttgaaaaatcgaagaatattgattgatattatagaatatgagtcggtgttatttgtatataaagtattaatatgtaattaagaaagtcgacgcttgttaacaataacaacaactatatgtataaaaaaacctcgcaacggttagttaactgaatcatttagctaacttcgttgtgaggtcattttgttttaataatatcgttataactttttcacggttaataataagtatatgaagaatggggcaccaaaagcagcaataaatacacctgctggcacttctttaggcaagaataaggtacgcccaattaagtctgcaataacaattgatatggcaccaatcattgctgacattagtaactttttagcataacttccgcgaacgattgttttcgcgatatgtggtgcgattaaaccgacaaacccaatgttacctactaaactgattgccatagatacgagtatagtagaagtgattaattggattagtttcatacgttgtacatgtaagcctaagccaatcgctacagggtcatcaagtatagatattttcatttttggtataacaagaaataacaacggcacaacagctaaaataaccatacccaaaatgattgtatctttaaacgtagcaccgtaaagacttccgactagccatgtataagctttggcagcagataattgcttcgttgtaatgagtaatccttggacaagcgcaataaacaacgtttgcatcgaaataccgatgattatgagtgttgtcgggcgtatttgtcctttcgtttgaaacactaatagtatcatcattgcaactgcgccacctaatactgcaaatagtggaagtaaatgtattgttaaatggctgaaaaatgcaataaagacaacagcacttaagctagcaccacctgtgataccgataatatcaggtgaggcaattggattttttaatacattttgcaacattaaaccactcattcctagtgcggcacctgctaaaatcgcaagtgtaatgcgaggtaagcgtaatacttctaaagtgaattgatccatactgtcatttggatttataaagtacatcagtacgcgttgtaatggtataaagcttgaaccaatcatcatacttaccactgaaacgatggctaaaaagattaacgcgaagatgagatggtaattgtcttttttattaatcttttcggtcataagcgttgacgtcctttcttcataatatagattaagacaatagcgccaatgacagcggtaacgacaccgataggcaactctagtggcttaattattatacgagcaacaatgtctgaaatgatcattaggattgctccagctaatgcagtaaaaggaattaaatacttatagtttggtggtaataatcgtttgctaatattcggtacgataagacccacaaagacgattgatccagctacggctaccgaaataccggctaacatactgatgagcataataatcatccatttgattaattttatgttttgaccgaggccggttgcaatgtcgtcacttgtcatcaagatgttgatgtgtgcagccatgctaaatgcaattaaaataagtatcaatacaagcggaataatccatgggatatcccaaatattacgtaatgaaacggagccacttaaccaaaataataggccttgtaagtctgtttcgttcataataagtatgccttgagtaaaggctgtaaatagcatcgcaatcgcagcacctgccaaaatgacacggtgaggtgagaatagtgtttgtctaaacatacctagtgcaacaactaatacagtaacaacaatagcccccaaaaatgcaataactacaatcattttaaaagattgaatttggataaatgtaatactaaaaatgacaaaaaatactgcgcctgcattgacaccgaaaagccctggtgaggctattgggtttcgtgtaagtgcttgcatcaacaaacctgagacagcaagggcagcaccagtcaataacgcaatgattgttctcgacgcccgtgcaccagtgacaacatcatgtaaatcgttttcactatcaaagttgaataacgcctgtatcaccgtacctggtgacacaagcgtatttccaatcattaaacttaagatagctactattgcaagacataaaccagcaataacgatttggtattttggtttaagtagcatcgtaaaactccttaattattttgattgtttttcaatatttaacttttcatataaatcgtcaataagttttaatgaagatttatatccgccagctaagttccaagtgatttcatctaaatcatcagatacttggttgtttttaactgcgtctaaatttttccactctttacttgaagtccattcgctttcagtctttttaactaatgcagcatctttcgcatttggatctgattttactacaaaaatatgatcagcgttcattaatggaatgctttctttagatgtaagttggataatatctttaccattatcaacttgtttttgtaagtctttattacgtttgaatcctaaatcatttaagatttcaccagcatatccaccagcataaattcttgtatgatcagcacggaagttaacaactgaagctttcaatggccatgcatctttatactttgcttttgcatctttttggaatgcagctactttatcatcgtactttttaagtaaatcttcagcttctttttctttccctaaagctttccccattaacttagttgtatctttgaatttgaaaactgtatcagtagaaactgttggtgcgattttagataattgatcgtaaactttttcatttctaacttttgacgcgacaattaagtccggttttaatttagagatttcctctaagttaggtgcaggttcttgacctacaatcttagtatcttttaaatcattttttatgtattcgaatttcggtttttgtgtccatgattctacagcacctacaggtttaacacctaaagatacagcgacgtcagtggcaccttgatatagcgtaacaacacgctttggtttccctttaatttcagttgtacccattgcatgtttaattgaagttgtttccttatctttgttatcagatgattgtttatttgaattcccactacatcctgctaaaacaagtaggaaagcaagcgtaacaacaagcattttaattactttattcattgactaattagcctccttcgtgatgtatgacaatgagaatcattatcacgatttagtatgaattaaattttttcctaagtcaataaaatatttatgatttacatgcaacttataattatttgacatataaatgcataaaaaatataatcctaattacttgatagtgagaatcattatcaattaggtaacacacaatattatagaattttaaatttgaggaggaagcgcttttgattgaaaaaagtcaagcatgtcacgattcattgttagattctgtagggcaaacacctatggttcaacttcatcaactatttccgaaacatgaagtgtttgcaaagttagagtatatgaatcctggaggcagcatgaaagatcgacctgccaagtacatcattgaacatggtattaaacatggtttaatcactgagaatacacatttaattgaaagtacttctggtaatttaggcattgcgttggcaatgatagctaaaatcaagggattaaaactcacgtgtgttgttgatcctaaaatatcaccaacaaatttgaaaattattaaaagttatggtgccaatgtagaaatggttgaagaacctgatgcacatgggggttatttaatgactcgtattgcaaaggtgcaagaactgttagccactattgacgatgcatattggattaatcaatatgcgaatgagttaaattggcaatcccattatcatggtgcaggcacagagattgttgaaacaattaagcaacctatagattattttgtcgcgccagtcagcacgacaggtagcattatgggtatgagtagaaaaataaaagaagtgcatccaaacgcacaaattgttgctgttgatgcgaaagggtcagtcatttttggtgacaaacctattaatagagaattacctggtatcggtgctagtcgtgtacccgaaatattgaatagatcagaaattaatcaagtgatccatgtagatgattatcaatctgctttgggctgtcgaaaactgattgattatgaaggcatatttgccggaggttcaacaggttcgattattgcagcgattgagcagttgataacgtcaattgaagaaggtgcaacaattgtcacgattttaccagatcgaggcgatcgttacttagatttagtttattcagatacatggttagaaaaaatgaaatcaagacaaggagttaaatcagaatgaatagagagatgttgtatttaaatagatcagatattgaacaagcgggaggtaatcattcacaagtttatgtggacgcattaacagaagcattaacagcccatgcgcacaatgattttgtacaaccgcttaagccgtatttaagacaggatcctgaaaatggacacatcgcagatcgaattattgcaatgccaagtcatatcggtggtgaacacgcaatttcaggtattaagtggataggtagtaagcacgacaatccatcgaaacgtaatatggagcgtgcaagtggcgtcattattttgaatgatccagaaacgaattatccaattgcagttatggaagcaagtttaattagtagtatgcgtactgcagcagtttcagtgattgcagcaaagcatttggctaaaaaaggatttaaagacttaacaatcattggatgcgggctaatcggagacaagcaattacaaagtatgttagagcaattcgatcatattgaacgcgtgtttgtttacgatcaattctctgaagcatgtgcacgctttgttgatagatggcaacaacagcgtccggaaattaattttattgcgacagaaaatgctaaagaagcagtatcaaatggtgaagtagtcattacatgtaccgtaacggatcaaccatacattgaatatgattggttacaaaagggtgcatttattagcaacatttctatcatggatgtgcataaagaagtctttattaaagctgacaaagtcgtagtagatgactggtcacaatgtaatcgagaaaagaaaactattaaccaattggtgttagaaggtaaattcagcaaagaagctcttcatgctgaactaggacaacttgtgacaggtgacataccaggacgtgaagacgatgatgagatcatattacttaatccgatgggtatggctatcgaagatatttcaagtgcttattttatttatcaacaggcacaacaacaaaatattgggacaacattgaacctatattaagaatgcgaggtgtctgaacattgcagaatcatacagcagtcaatacagcacaagcgataatattaagagatttagttgatgcattattatttgaagatatagccggaattgtatcgaatagtgagattactaaagaaaacggacaaacgcttttgatatacgaacgtgaaacacaacaaataaagatacctgtttattttagtgctttaaatatgtttcgttacgaaagttcacaaccaattacgatagagggaagggtgtctaagcaacctttaacggcagctgaattttggcaaacaattgctaatatgaattgtgatctaagtcatgaatgggaagtggctcgcgttgaagaaggactgactactgctgccacacagcttgctaaacaattatcagaattagatttagcgtcacatccttttgtgatgtcagagcagtttgcaagtttaaaagatcgtccatttcatccattagctaaagaaaaaagaggattaagagaagcggattatcaagtgtatcaagctgaattaaatcaatcatttcctttaatggttgcagcagttaaaaagacacatatgattcatggcgatactgcaaatatcgatgaattagaaaatttgacagtacctataaaagaacaagcgacagacatgttaaatgatcaagggttatcaatagatgactatgtactatttccggtacatccttggcaatatcagcatattctgccgaacgtctttgcgaaagagattagtgaaaagttggttgtactattaccgttaaaatttggagattatctgtcgtcttcaagtatgcgttcattaattgatattggcgcaccgtataaccatgtcaaagtaccatttgcaatgcagtcattaggcgcattaaggctaacgcctacgcgttacatgaaaaacggagaacaagcagaacaattattacgtcagcttatagaaaaagatgaagcactagctaagtatgtcatggtttgtgatgaaacagcttggtggtcatatatgggtcaagataatgatattttcaaagatcaattaggtcatctaactgttcagctaagaaagtatcccgaagtgctagccaaaaatgatacgcaacagctagtgtcaatggcagcactcgcggcaaatgatcgcactttatatcaaatgatttgtggaaaagataatatttctaaaaatgatgtcatgacgttatttgaagatatcgcgcaagtctttttaaaggtaacactatcatttatgcaatacggcgcattaccagagttgcatggtcaaaatatattgttgtcatttgaagatggacgtgtacaaaaatgcgtgttacgtgatcatgatactgtcagaatttataaaccatggctaacagcacatcagctttcattgccgaagtatgtcgtcagagaagatacacctaatacgctaattaatgaggatttggaaacattctttgcttattttcaaacattagctgtatcggtaaatctatatgccattattgatgcaattcaagatttatttggtgtaagtgagcatgaacttatgtcgttgttaaaacaaattttaaaaaatgaagtggcaactatttcctgggttacaactgatcagctagctgtcagacacattttatttgataaacagacgtggccattcaaacaaattttattaccattgctatatcaacgtgatagtggtggaggtagtatgccttcaggtttaactaccgtaccaaatccaatggtgacatatgattaatcagtctatatggcgcagtaactttcgcattttatggctcagtcagtttatagcgattgctggactgacagtacttgtgccattattgccaatttatatggcatcactacaaaatctatcagtcgtagaaatacagttgtggagtggtatagcgattgctgctccagctgtaacgacgatgatagcttcgccgatatgggggaagctaggtgataagatcagccgaaaatggatggtgttaagagcgttacttggtttggcggtatgcttatttttaatggcattgtgtacgacaccattacagtttgtacttgtgaggttattgcagggactatttggtggtgttgttgatgcatcaagtgcgtttgcgagtgcagaggcgccagctgaagatcgtggaaaggtattaggaagactgcaaagttcagtcagcgcagggtctcttgtggggccattaattggcggtgttacagcttcgatattaggttttagtgcgttactgatgagtattgccgttattacttttattgtctgtattttcggtgcattaaaattgattgaaacgacacatatgccaaaatcacaaacaccaaatattaataaaggtattcgccgttcatttcaatgtctattatgcacacaacaaacatgtcgatttattatcgttggcgttttagcaaactttgctatgtatggcatgctaactgcattatcaccacttgcttcatcagtgaatcatacagcgatagatgaccgtagtgtgattggatttttacagtccgcattttggacggcttcgatattaagcgcgcctttatggggacgctttaatgataaatcatatgttaaatcagtatatatatttgccacgattgcatgtggttgtagtgcgatactgcaaggtttagcgacgaatatagagtttttaatggctgcaagaatacttcaaggattaacatatagtgcattgattcaaagtgtcatgtttgttgtcgtgaatgcgtgtcatcaacaacttaaaggcacatttgttggaacgacgaacagtatgttagttgttggtcaaattattggcagtcttagtggcgctgccattacaagttatactacaccagctactacgtttatcgttatgggcgtagtatttgcagtaagtagtttatttttaatttgttcaaccatcactaatcaaatcaacgatcacacattaatgaaattatgggagttgaaacaaaaaagtgcaaaataaagaattaatacaacatgcagcgtatgcggctatcgaacgcattttaaatgaatattttagagaagaaaatttatatcaagtaccacctcaaaatcatcaatggtctatacaattatcagagctcgaaactttaacgggtgaatttcgctattggtctgcgatggggcatcatatgtatcatccagaggtatggcttatcgatggaaaaagtaaaaaaataacaacttataaagaagcaattgcgcgtattttgcaacatatggctcaaagtgcagataatcaaacggcagtgcaacaacatatggcgcaaattatgtctgacatcgataatagcattcatcgcacggcacgttatttgcaaagtaacacaatagactacgtagaggatcgttatatcgtttcagaacaatctttatacttaggtcatccatttcatccgactcctaagagtgcaagtgggttttcagaagcagatttagagaaatatgcacccgaatgtcatacatcattccaattgcattatttagctgtgcatcaagatgttctgctcacgcgctatgtagaaggtaaagaagatcaggttgagaaagtgttgtatcaattagcagacatagatatatcagagatacccaaagattttattttattaccaacacatccttatcaaatcaatgtgttgcgacagcatccacagtatatgcaatatagtgaacaaggtttaataaaagaccttggcgtttccggtgattcagtgtacccgacgtcttcggttagaactgtattttcaaaagcattaaacatttatttaaaattaccgatacacgttaaaatcactaattttatacgtacgaatgaccttgaacagattgaacggacaattgatgccgcgcaagttatcgcatcagtcaaagatgaggttgaaacaccccattttaaattgatgtttgaagaaggatatcgtgcattgttaccgaatccattagggcaaacagttgaacctgaaatggatttattaacaaatagtgccatgattgttcgtgaagggataccgaattaccatgctgataaagatattcatgtattggcgtcattatttgaaacgatgcctgattcaccgatgtctaagttatcacaagtgattgagcaaagtggtttagcaccagaagcatggcttgaatgttatttgaatcgtacattattgccgatattaaagctgtttagtaacacaggcattagtctagaagcacatgtacaaaatacattaattgaattaaaagatggcatacccgacgtatgctttgtcagagatcttgaaggcatttgtctatctagaacgattgctactgaaaaacagcttgtgccaaatgttgtggcagcatcaagccctgttgtatatgcacatgatgaagcatggcatcgtcttaaatattacgttgtagtaaatcacttaggacatttagtatcaactattggtaaagcgactagaaatgaagttgtgttatggcaacttgtagcgcatcgtcttatgacttggaaaaaagaatacgcgaataacgcagtatttgttgactgtgtagaagatttatatcaaacgccgaccattgcggctaaagcgaatttgatgagtaaattgaatgattgtggtgcaaaccctatttatacacatataccaaatccaatttgtcataacaaggaggtatcgtattgtgaatcaaacaattcttaatcgtgtaaagactagagtgatgcaccaactggtatcatcacttatttatgagaatattgttgtgtataaagcgtcatatcaagacggtgtcggtcattttacaatagaaggacatgattcagagtatcgttttactgctgaaaagacacatagctttgatcgtatacgtatcacatcaccaattgagcgtgtcgtaggagatgaggcagatacaacaacagactatacacaattattgagagaggttgtatttacatttcctaaaaatgatgaaaagctagaacaatttattgtcgagttattacagacagaattaaaagatacgcaaagtatgcagtatcgagaatcaaacccaccagcaacacctgagacatttaacgactatgaattttatgcgatggaagggcatcagtatcatccaagttacaaatcacgtttaggatttacgttgagtgataatttgaaatttggtcctgattttgtaccaaacgttaaactgcagtggttagctatcgacaaagataaagtagaaacgacggtatcaagaaatgttgtagttaacgaaatgttacgtcaacaagttggcgataagacttatgaacattttgtacagcaaattgaagcatctggcaaacatgtaaatgatgttgagatgatacctgtacacccatggcagtttgaacatgtcatccaagttgatttggctgaagaaaggcttaatggcacagtactatggttaggggaaagtgatgagctatatcaccctcaacaatcgattcgtacgatgtcgccaatagacacgacaaaatattatttaaaggtaccaataagtataacgaacacttcaacgaaacgagtgttggcgcctcatacaattgaaaatgcagcgcaaattacggattggttaaagcagatacagcaacaagatatgtatttaaaagatgaattaaagacagtttttctaggggaagtcttaggacagtcttatttaaatacacaactttcgccttataaacaaactcaagtttatggtgcgttaggtgttatatggcgtgaaaatatatatcatatgttaatcgatgaagaggatgcgataccatttaatgcactttatgcaagtgataaggatggtgtaccattcattgaaaattggattaaacaatatggttctgaagcttggacaaagcaatttttagctgtagcgattcgtccaatgattcatatgctttattatcacggtattgcctttgaatcgcatgcacaaaatatgatgctcattcatgaaaatggttggcctacacgtattgccttaaaagatttccatgatggtgttcgttttaagcgtgagcatttaagtgaagctgcttcacacctgacattaaagccaatgccagaagcacataaaaaagtgaatagtaattcatttattgaaacagatgacgaacgtttagtacgcgactttttacatgatgcatttttctttattaatatcgccgaaatcatcttatttattgaaaagcaatatggtatcgatgaggagctgcaatggcaatgggttaaaggcatcatcgaggcgtatcaagaagcatttccagagttgaataactatcaacatttcgatttgtttgaacctacgattcaagttgaaaagttaacgacacgtcgattattaagtgactccgagttaagaattcatcatgttacaaatccattaggtgtaggaggtatcaatgatgcaacaactatctctgaaacatagattaaacaatggtgattcagtttatggcatttttaattctataccggacccattgatgatcgaggttatcgcagcaagcgggtatgactttgttgtgattgatacagaacacgtggcgattaatgatgagacactagcgcatttaattcgtgcagctgaagcagcgcatattataccaattgtacgtgtcactgcagtgatagatagagatatcattaaagtgttggatatgggtgcgagaggtattattgtgccacacgttaaagatcgtgagacagttgagcatattgtgaaattaagtcgttattacccgcaaggattaagaagtttgaatggtggtcgcatggcaagatttggacgtacaccattacttgatgcaatggagatggctaatgagcatattatggtgattgccatgatagaagatgttgaaggggttatggccattgacgatatagcacaagtcgaaggtttagacatgatagtcgaaggtgccgcagatttatcgcagtcacttggcataccatggcaaacgcgtgatgatcaagtaacatcacatgttcaacatatttttgaagttgtgaatgcacatggtaaacatttttgtgcattaccacgtgaagatgaagatattgcaaaatggcaggcacaaggtgtacaaacatttattttaggtgatgatcgcggaaaaatatatcgccatttaagtgcatctctagcgacgtctaaacagaaaggggatgaaggctaatgcgtatagttcaacctgttattgaacaattaaaagcacaatctcatccagtttgtcattatatctatgatttagtcggactggaacatcatttgcaacatattacatcgtcattgccgagtaattgtcaaatgtactatgcaatgaaagcaaatagtgaacgaaaaatcctagatacaattagtcagtatgttgaaggattcgaagttgcatctcaaggtgaaatagcaaaaggtcttgcttttaaaccagcaaatcatattatttttggtggccctggtaagacagacgaggaactaagatatgcagtaagtgaaggtgttcagcgtattcatgttgaaagtatgcatgaattacaacggctaaatgccatcttagaagatgaagataagacacaacacattttattgcgtgttaatttagcaggaccatttcccaatgcaacgttgcatatggcaggacgcccaacacaatttggtatttctgaagacgaagttgatgatgtcattgaagctgcgctcgcaatgccaaagattcatctagatggatttcattttcattctatttctaacaatttagactcgaatttacatgtcgatgtagtgaaactttattttaaaaaagcaaaggcatggtctgaaaaacatcgatttccactcaaacatatcaatcttggtggtggcataggcgttaactatgcagatttaactaaccaatttgaatgggataattttgtagaacgttttaaaacacttatcgttgagcaagaaatggaagatgtgacattgaactttgaatgtgggcgctttattgtggcacatattggttactatgtgacagaagtgctagacattaagaaagtacatggtgcttggtatgccatattaagaggaggtacgcaacaatttagactgccggtatcttggcaacataaccatccttttgacatttatcgctataaggacaatccatattcatttgaaaaagtttcaatttcgagacaggacacaacgttagtcggtcaattatgtacaccgaaagatgtctttgctagagaagtacagatagacgcaatcagtacaggcgacgttattgttttcaaatatgcaggtgcatacggatggtctatttcacatcacgatttcttaagccatccacatcctgaatttatttatttaacacaaacaaaggaggatgaataactattgaatcatattcatgaacatttaaaattggtaccagtagataagattgatcttcacgaaacattcgaacctttaagattggaaaaaacgaaaagtagtattgaagcagatgattttatacgtcatcctattttagtgacagcgatgcaacatggtagatatatggttatagatggtgtgcatcggtatacaagtttgaaagcgttaggatgtaagaaagttccagtgcaagaaatccatgaaacacaatattcaattagtacatggcaacataaagttccatttggtgtgtggtgggaaacgttacaacaagaacatcgcttgccatggactactgagacaagacaagaagcgccatttattacaatgtgtcatggtgatacagaacaatatttgtatacaaaagatttaggcgaagcacattttcaagtatgggaaaaggttgtcgcaagttatagtggttgttgttctgtagagagaattgcacaaggtacatatccttgtctttctcaacaagatgtactcatgaagtatcagccattgagttataaggaaattgaagcggttgttcataaaggggaaactgtgccagcaggtgtgacacgctttaatatttcaggacgatgtcttaatcttcaagtaccactggcattacttaaacaagatgatgatgttgaacaactgcgcaattggaagcagtttttagcagataagtttgccaatatgagatgctatactgaaaaagtatacttggtggagcaatagttttactgtgatgttgagggaaatatgatgatttagcgtattgatagcgaaaatataataaaacaatatagtgtggagaacttttgatattttataaatattgaagttctccatttttgtattttgcatataaaaattaaataaaataaggtatattaaggtaaagtataaattttaaataaatggggaatgagtatgagctcaattataggaaaaatagcaatttggataggcatcgtagctcaaatatattttagtgtcgtttttgttaggatgatatctattaatattgctggaggatctgattacgaaacaatttttttattaggattaatattggctcttttcactgttttaccaaccatctttactgcgatttatatggaaagttactctgtaatcggaggtgcactttttattgtttatgctattattgcactgtgtttatataatttcctttcgtcaattttatggctgattggtggtattttgctgatttggaataaatactcaaaagatgaatcgacagacgaaaatgaaaaagttgatattgaaagtacagagaatcaatttgaatctaaagataaaatcactaaagaataaagagaatatttaaggtaaagtataaattttaaataaatggggaatagacatggaaaaaaatgtagaaaaatcattcataaagataggtttatattttcaaatagcttatatagtactcatggctataactttatgtgggtttgtaatttgctatggactaattttcggccttttctatttattatcaggtagcagagctgattatttaatagtaacaatagttatatcggcaataatttctatatttgtaattatactttcaatcgtacctgtcatcgtattggcatctgacttatttaaagaaaggatttcaaaaggtgtcatattaattgtattggctattatcgctttagtattatgcaactttgtatctgcaatactctggtttgtttcagccatatctattttaggtagaaaaaaattagtagctgcagcagatactaccactattcaaaaaagtaaagggaacgcaaatcaagcatcacataaagacacgtgtaaaaaggaacttgatagtcaagacatgatggaacatcctgaggttaaaaatcccacgactaaaaaccttgaaggatttaacgaagaaatacataaagatgaagctacaactaaagttgtcagtgataacacggaaccgcctattgaatcaaaagaccatgtctcgaaaaaagattgatgacaaactaatcgagagacttaaaaaaataatattcaacataagaacttttaaaacgacatttaaacgcattgccaatcactaatggtagtgcgtttaactataccttaaatatctgaatattttgttaaatggagctacctttgttgtactattcaaatgaagaggagtaaaatgtaattaaaggaaagaaatttgaggagtgatctttatgacaaacaacaaagtagcattagtaactggcggagcacaagggattggttttaaaattgcagaacgtttagtggaagatggtttcaaagtagcagttgttgatttcaatgaagaaggggcaaaagcagctgcacttaaattatcaagtgatggtacaaaagctattgctatcaaagcagatgtatcaaaccgtgatgatgtatttaacgcagtaagacaaactgccgcgcaatttggcgatttccatgtcatggttaacaatgccggccttggaccaacaacaccaatcgatacaattactgaagaacagtttaaaacagtatatggcgtgaacgttgcaggtgtgctatggggtattcaagccgcacatgaacaatttaaaaaattcaatcatggcggtaaaattatcaatgcaacatctcaagcaggcgttgagggtaacccaggcttgtctttatattgcagtacaaaattcgcagtgcgaggtttaacacaagtagccgcacaagatttagcgtctgaaggtattactgtgaatgcattcgcacctggtatcgttcaaacaccaatgatggaaagtatcgcagtggcaacagccgaagaagcaggtaaacctgaagcatggggttgggaacaatttacaagtcagattgctttgggcagagtttctcaaccagaagatgtttcaaatgtagtgagcttcttagctggtaaagactctgattacattactggacaaacaattattgtagatggtggtatgagattccgttaataatcatccactaatgataaataaatccttattgttaagtttaatcacttagcagtaaggattttttagtgcacttagaagggagtgtattggtagaaaattaataagcgaagttcttaagtgagttatgatgtcacagtctaatgcatcagttgaaagcattattagtattaacacacccaagatattataaaacatcacaaaaacaccactatctaatttatctcaataaaaattcacaaagttatctcattttatttttataaataaaaaatatcgataaaaagcttacaatactttatgtttttatgatatatttttaatgtataaatgaggtggaagatttggaaagagttttgataactggtggggctggttttattgggtcgcatttagtagatgatttacaacaagattatgatgtttatgttctagataactatagaacaggtaaacgagaaaatattaaaagtttggctgacgatcatgtgtttgaattagatattcgtgaatatgatgcagttgaacaaatcatgaagacatatcaatttgattatgttattcatttagcagcattagttagtgttgctgagtcggttgagaaacctatcttatctcaagaaataaacgtcgtagcaacattaagattgttagaaatcattaaaaaatataataatcatataaaacgttttatctttgcttcgtcagcagctgtttatggtgatcttcctgatttgcctaaaagtgatcaatcattaatcttaccattatcaccatatgcaatagataaatattacggcgaacggacgacattaaattattgttcgttatataacataccaacagcggttgttaaattttttaatgtatttgggccaagacaggatcctaagtcacaatattcaggtgtgatttcaaagatgttcgattcatttgagcataacaagccatttacattttttggtgacggactgcaaactagagattttgtatatgtatatgatgttgttcaatctgtacgcttaattatggaacacaaagatgcaattggacacggttataacattggtacaggcacttttactaatttattagaggtttatcgtattattggtgaattatatggaaaatcagtcgagcatgaatttaaagaagcacgaaaaggagatattaagcattcttatgcagatatttctaacttaaaggcattaggatttgttcctaaatatacagtagaaacaggtttaaaggattactttaattttgaggtagataatattgaagaagttacagctaaagaagtggaaatgtcgtgaaaatgacattgaagctgtccataataataagggttatgcctatcaaagaaaattagacaaactagaagaagtgagaaaaagctattacccaattaaacgtgcgattgacttaattttaagcattgttttattatttttaactttaccgattatggttatattcgccattgctatcgtcatagattcgccaggaaaccctatttatagtcaggttagagttgggaagatgggtaaattaattaaaatatacaaattacgttcgatgtgcaaaaacgcagagaaaaacggtgcgcaatgggctgataaagatgatgatcgtataacaaatgtcgggaagtttattcgtaaaacacgcattgatgaattaccacaactaattaatgttgttaaaggggaaatgagttttattggaccacgcccggaacgtccggaatttgtagaattatttagttcagaagtgataggtttcgagcaaagatgtcttgttacaccagggttaacaggacttgcgcaaattcaaggtggatatgacttaacaccgcaacaaaaactgaaatatgacatgaaatatatacataaaggtagtttaatgatggaactatatatatcaattagaacattgatggttgttattacaggggaaggctcaaggtagtcttaatttacttaataagttcaaataaaagttatattttaaagattgtgaccaattgttacagtataacgaggaatcccttgagacagtatcaaatggcattaagaaatatgtgccatcattgatttgcatggctataaatactattcatctgatgagatagccatgttaagaaattgaaagtatagcattaaaggggtttgtaacagttgaaaattatatattgtattactaaagcagacaatggtggtgcacaaacacatctcattcaactcgccaaccatttttgcgtacacaatgatgtttatgtcattgtaggcaatcatggaccaatgattgaacaactagatgcaagagttaatgtaattattatcgaacatttagtaggtccaattgactttaaacaagatattttagctgtcaaagtgttagcacagttattctcgaaaattaaacctgatgttatccatttacattcttccaaagctggaacggtcggacgaattgcgaagttcatttcgaaatcgaaagacacacgtatagtttttactgcacatggatgggcttttacagagggtgttaaaccagctaaaaaatttctatatttagttatcgaaaaattaatgtcacttattacagatagcattatttgtgtttcagatttcgataaacagttagcgttaaaatatcgatttaatcgattgaaattaaccacaatacataatggtattgcagatgttcccgctgttaagcaaacgctaaaaagccaatcacataacaatattggcgaagtagttggaatgttgcctaataaacaagatttacagattaatgccccgacaaagcatcaatttgttatgattgcaagatttgcttatccaaaattgccacaaaatctaatcgcggcaatagagatattgaaattacataacagtaatcatgcgcattttacatttataggcgatggacctacattaaatgattgtcagcaacaagttgtacaagctgggttagaaaatgatgtcacatttttgggcaatgtcattaatgcgagtcatttattatcacaatacgatacgtttattttaataagtaagcatgaaggtttgccaattagcattatagaagctatggctacaggtttgcctgttatagccagtcatgttggcggtatttcagaattagtagctgataatggtatatgtatgatgaacaaccaacccgaaactattgctaaagtcctggaaaaatatttaatagacagtgattacatcaaaatgagtaatcaatctagaaaacgttatttagaatgttttactgaggagaaaatgattaaagaagtggaagacgtttataatggaaaatcaacacaatagtaaattactaacattgttacttatcggtttagcggtttttattcagcaatcttcggttattgccggtgtgaatgtttctatagctgactttatcacattactaatattagtttatttactgtttttcgctaaccatttattaaaggcaaatcattttttacagtttttcattattttgtatacatatcgtatgattattacgctttgtttgctattttttgatgatttgatatttattacggttaaggaagttcttgcatctacagttaaatatgcatttgtagtcatttatttctatttagggatgatcatctttaagttaggtaatagcaaaaaagtgatcgttacctcttatattataagcagtgtgactataggtctattttgtattatagctggtttgaacaagtcccctttactaatgaaattgttatattttgatgaaatacgttcaaaaggattaatgaatgaccctaactatttcgcgatgacacagattattacattggtacttgcttacaagtatattcataattacatattcaaggtccttgcatgtggtattttgctatggtctttaactacaacggggtctaagactgcgtttatcatattaatcgtcttagccatttatttctttattaaaaagttatttagtagaaatgcggtaagtgttgtgagtatgtcagtgattatgctgatattactttgttttaccttttataatatcaactactatttattccaattaagcgaccttgatgccttaccgtcattagatcgaatggcgtctatttttgaagagggctttgcatcattaaatgatagtgggtctgagcgaagtgttgtatggataaatgccatttcagtaattaaatatacactaggttttggtgtcggattagtggattatgtacatattggctcgcaaattaatggtattttacttgttgcccataatacatatttgcagatctttgcggaatggggcattttattcggtgcattatttatcatatttatgctttatttactgtttgaattatttagatttaacatttctgggaaaaatgtaacagcaattgttgtaatgttgacgatgctgatttactttttaacagtatcatttaataactcaagatatgtcgcttttattttaggaattatcgtctttattgttcaatatgaaaagatggaaagggatcgtaatgaagagtgattcactaaaagaaaatattatttatcaagggctataccaattgattagaacgatgacaccactgattacaatacccattatttcacgtgcatttggtcccagtggtgtgggtattgtttcattttctttcaatatcgtgcaatactttttgatgattgcaagtgttggcgttcagttatattttaatagagttatcgcgaagtccgttaacgacaaacggcaattgtcacagcagttttgggatatctttgtcagtaaattatttttagcgttaacagtttttgcgatgtatatggtcgtaattactatatttattgatgattactatcttattttcctactacaaggaatctatattataggtgcagcactcgatatttcatggttttatgctggaactgaaaagtttaaaattcctagcctcagtaatattgttgcgtctggtattgtattaagtgtagttgttatttttgtcaaagatcaatcagatttatcattgtatgtatttactattgctattgtgacggtattaaaccaattacctttgtttatctatttaaaacgatacattagctttgtttcggttaattggatacacgtctggcaattgtttcgttcgtcattagcatacttattaccaaatggacagctcaacttatatactagtatttcttgcgttgttcttggtttagtaggtacataccaacaagttggtatcttttctaacgcatttaatattttaacggtcgcaatcataatgattaatacatttgatcttgtaatgattccgcgtattaccaaaatgtctatccagcaatcacatagtttaactaaaacgttagctaataatatgaatattcaattgatattaacaatacctatggtctttggtttaattgcaattatgccatcattttatttatggttctttggtgaggaattcgcatcaactgtcccattgatgaccattttagcgatacttgtattaatcattcctttaaatatgttgataagcaggcaatatttattaatagtgaataaaataagattatataatgcgtcaattactattggtgcagtgataaacctagtattatgtattattttgatatatttttatggaatttacggtgctgctattgcgcgtttaattacagagtttttcttgctcatttggcgatttattgatattactaaaatcaatgtgaagttgaatattgtaagtacgattcaatgtgtcattgctgctgttatgatgtttattgtgcttggtgtggtcaatcattatttgccccctacaatgtacgctacgctgctattaattgcgattggtatagtagtttatcttttattaatgatgactatgaaaaatcaatacgtatggcaaatattgaggcatcttcgacataaaacaatttaagtaccggtaatgctatactttagaaaattaagattaagaagaaaaggcaatttcttattgaaaaatggaagttgtcttttttaattctctttaaaagcgggaaacaaaagcagttaaatgcctttttgcattcaatattaaatattatatcaatttcgaatatttaaattttatataattggatataacaaataaataataattattgcaaaacacacccaaaattaattattataaaagtatattcataaaaggaggaatatacttatggcatttaaattaccaaatttaccatatgcatatgatgcattggaaccatatatagatcaaagaacaatggagtttcatcacgacaaacatcacaatacgtacgtgacgaaattaaacgcaacagttgaaggaacagagttagagcatcaatcactagcggatatgattgctaacttagacaaggtaccggaagcgatgaggatgtcagtccgtaataatggcggtggtcattttaaccattcattattctgggaaatactatcacctaattctgaagaaaaaggtggcgtaatagatgacatcaaagcgcagtggggcactttagatgaatttaaaaatgaatttgcaaataaagcaacaacattatttggatcaggttggacttggttagttgttaatgatggcaaattagaaattgtgacaacgccaaaccaagataatccattaacagaaggcaaaacaccaatcttactatttgatgtttgggagcatgcctactatctgaaatatcaaaataaacgtccagactatatgactgcattttggaacattgttaactggaaaaaagttgatgaattataccaagcagcaaaataatataacttaatataattgaggtggagcatctacaaggtgttccacttttttgtacttaatatctttacttatttgtttttgtgtaatgggatagcacgtaaaagtggaaaaataataagataaatttcaactcgaaataccttattattgttgactataacgatgacctaaatattatatacattagacaacactattaattaatcaacatattgacattaaataaattgacaaaataagtaattattgtgaatctaaagtgaaatttttataaaaaaatgtaatgattcaaaaattttgttgcatttcttttgtaatcgtatgataatgtaaatgtaatcaaattgtaatataaggggacaagacaatgaaaaaattagcaacagtaggttctttaattgtaacaagcactttagtattctcaagtatgccttttcaaaatgcgcatgccgacacaacttcaatgaatgtgtcgaataaacaaagccaaaatgtacaaaatcatcgtccttatggcggagtagtaccacaaggaatgacgcaagcacaatatactgaattagagaaagctttaccccaattaagcgctggcagtaatatgcaagactataatatgaaattgtatgatgcgacgcaaaatattgctgataaatacaatgtgataattacaactaatgtaggggtatttaaaccacatgctgttagagatatgaatggccatgcgttacctttaacaaaagatggcaatttttatcaaacgaatgtagatgcaaatggtgttaatcatggtggtagtgaaatggtgcaaaataaaacaggtcatatgagtcaacaaggccatatgaatcagaacacacatgaaccaacagccacacatgcaacaaggtcatatgcaatcatcaaaccatcaaatgatgagtccaaaagcaaatatgcattcatcaaatcatcaaatgaaccaaagtaacaaaaaagttttaccagctgctggtgaaagtatgacatcaagtattcttactgcaagtattgccgcactactattagtatctgggttattcttagcatttagacgacgttcaacaaataaataaacataatacgattaataatagaaaaatcgtgtgattatctgagcgagcctaggacataaatcaatgtcctaggctcgctaatgttatattggcagtagttgactgaatgaaattgcgcttgtaacaagcttttccatttcttaccaactccctaaatagtcatcaaaaaatttcttatattttaataatttttaataatccgattgtcttatacgtgtcagtgttaattcagatatttcctgtggaatataccacttattaatcataattggataaggtgtttgtgcgtacagtgtttcaataatcagccaacaatgtgtatcaccatcaaacacgtgactatgatttttgaagtggggcgctttggtaatagacatttttaaatctgattgatatgcattgctataaatcgtttgctcaacgaatgtcttcatgtcgtcttcgttttgtgtattcactttaaatgtgtcaatgacatttaacggtataaaggtaaagcaaaatgcatcagcttgcttagaatgattgtcctttttttgataatagcgttccattgcaatgacggcagaaggatggtttgcaaacaaatgatttgtatattcactttctaaatcaacacgataattaattgatgacatagatacgcgagctagcaatatttgatcaagtggatgcttaaattgatccatacttgaagcgtgttgggcatttgtttgtggaataacaaagtgtcccttccctcttgtactctctacgatgccatcttcggctaacaattttatagcttggcgcaaagtcatacgactgacatcaaagcgcgcacaaagttccttttcagtaggtaatgcatggccactcggatattttcctatttgaatttctttatataacgtattataaatcgttaaaaattttggttgtgtttgcgtcacgtagacaacctccataaagttacttaatcactctcatcatacaataatttttactcaaattggaaaaattataaaaattaaatatagataggctttgaaaattagttttatacaaggttagtagctgtaactgtaaaatgttcttaatattgtcaaaatgtaatgcttgaaagcgcttttaaaaaatattattatatacatggttagacaaatagacaaatcactatacaaatattgggaggaatattttatgaaatcaacaccacacattaaaccaatgaatgacgtcgaaattgcagaaacggttctattgccaggagatccgttaagagctaagttcattgcagaaacttatttggatgatgtggaacagttcaatacagtgcgaaacatgtttggttttaccggaacatataaaggtaaaaaagtttctgtcatgggttcaggtatgggtatgccatctattggcatttactcttatgaattaattcatacatttggttgtaaaaaattaattcgcgttggctcttgtggcgcgatgcaagaaaacattgatttatatgatgtgattattgcacaaggtgcctctactgattcaaattacgttcaacaatatcaattaccaggtcattttgcgccaattgcttcttatcaattattagaaaaagcagttgaaacagcacgtgacaaaggtgtacgtcatcatgtaggtaatgtgttatcaagtgatattttctataacgcggatacaacagcgagtgaacgttggatgcgtatgggtattttaggtgtagaaatggaatcagctgcattatacatgaatgcaatttacgctggtgtcgaagcattaggtgtgttcacagtgagcgatcatttaattcatgaaacgtcaacaacacctgaggaaagggaacgtgcatttacagatatgattgaaattgcactgtcattggtgtagatgattatgaatgttgaatattctaaaataaagaaagcagtacctattttattattcttatttgtattcagtttggttatagacaactcatttaaattgatttctgtagccattgctgatgacttaaacatatctgtaacgacagtaagttggcaagcgacattagccggtttagtaattggtattggcgctgtagtatacgcttcattatctgatgccattagtatacgcacactatttatttatggcgtgatattaatcattatcggatcaattattggttacattttccaacatcaattcccattacttttagttggacgtattattcaaactgccggtttagctgctgcagagacattatatgtgatatatgttgcaaagtatctttctaaagaggaccagaagacttaccttggcttaagtacgagcagttattccttgtcattagttatcggtacattatcaggtggatttatttctacgtatttacactggacaaatatgtttttaattgcattaatcgtagtatttacgttgccattcctatttaaattattaccaaaagaaaataatacgaataaagctcatttagattttgttggcttaattctagtggcaactattgctacaacagtcatgctgtttattacgaactttaattggttatatatgattggtgccttaattgcgattatcgtttttgcgctatatattaaaaatgcgcaacgtccattagtaaataaatcatttttccaaaataaacgttatgcttcatttttatttatagtatttgtaatgtatgctatccaattgggttatatttttacgttcccattcataatggagcaaatttatcatctgcaactagacacaacatcactgttattagtaccgggttatatagtagcagtcattgttggtgcactaagtggtaaaatcggcgaatatctgaattcaaaacaagcgattatcacagcaattattttaatagcactgagcttgattttacctgcatttgcagtaggtaatcacatttcaatcttcgtcatttctatgatattctttgcaggtagctttgctttaatgtatgcacctttacttaacgaagccattaaaacaatagatcttaatatgacaggtgtggctattggtttttataatttaattattaatgtggcggtatctgtaggtattgcgattgctgcggctctaatcgattttaaagcattaaatttcccaggcaatgatgcattaagttcacatttcggtattattttaattattttaggtttaatgagtattgtcggattagttttattcgtcagcttaaatcgttggacacaatctgaaaaataaatagatataaattcgcgagatatattcgtatttatagtaaaattaaataaagagattatataacacgaggagtagtaagtatgaaatttgagaaatatatagatcacactttattgaagcctgagtcaacacgtacgcaaatcgatcaaatcatcgatgaagcgaaagcatacaattttaaatctgtatgtgtgaatccaacacatgttaaatatgcagcagagcgactagctgattcagaggtgctcgtttgtacggtaataggattcccattaggtgcgtcgacaactgcaacgaaagcatttgaaacagaagatgcaattcaaaatggtgcagatgaaattgacatggtcatcaacatcggcgcattaaaagatggacgttttgatgatgtacaacaagacattgaagcagtggttaaagctgcgaaaggtcacacagtaaaagtgattattgagacggtattgttggaccatgacgaaattgtaaaagcgagtgaattaacaaaagcggctggtgcggacttcgttaaaacttcaacaggttttgcaggtggcggtgcgactgcagaagacgttaaattaatgaaagatacagtaggtgctgatgtagaagtaaaagcatcaggtggcgtacgtaatttagaagatttcaataaaatggttgaagcaggtgcgacacgtattggtgcgagcgcaggtgttcaaattatgcaaggtttagaagcagattcagattactaatatatataaattttgggagtgatagctatgacaagaccatttaatcgtgtacatttaatcgtaatggattcagtaggtattggtgaagcgccagacgcagctgattttaaagatgaaggttcacatactttaagacataccttagaaggtttcgatcaaactttaccaaaccttgaaaagttaggtctagggaacatcgataaattaccagtagtaaatgcagttgaacaaccagaagcatactatactaaattgagtgaagcttcagttggtaaagatacaatgactggtcactgggaaattatgggattaaatattatgcaaccttttaaagtataccctaatggattccctgaagagttaattcaacaaattgaagaaatgacaggtcgtaaagttgttgctaacaaaccggcatcgggtacgcaaattatcgatgagtggggcgagcaccaaatgaaaactggtgacttaattgtttatacaagtgcagacccagtattgcaaattgctgcacatgaagacattatcccattagaagagttatatgatatttgtgaaaaggttcgtgagttgacaaaagaccctaaatatttaattggtcgtattatcgcacgtccatatgttggtgaaccaggaaactttacacgtacatctaatcgacatgactatgcgttaaaaccttttggtaaaactgtcttagatcatttgaaagacggtggttatgatgttattgccatcggtaaaattaatgacatttatgatggtgaaggtgtaacagaagcggttcgtacgaagagtaacatggacggtatggatcaattgatgaaaattgttaagaaagatttcacaggtattagcttcttaaacttagtagactttgatgcattatacggtcatcgtcgtgataaaccaggttatgcacaagcaattaaagatttcgatgatcgcttgccagaactgtttagcaacttaaaagaagacgatttagtaattattacagcagaccatggtaatgacccgacagcgccaggtacggaccatacgagagaatatatcccagtaattatgtacagtccgaaatttaaaggtggtcatgcactagaaagtgatactacattcagttctatcggtgcaactatagcagataatttcaacgtaacattaccagagttcggtaaaagttatttaaaggaattgaaatagaataaatttagatattataaaaacagcagtgaagttaactataacaatagttttcttcactgctgtttttattataatagagaaacgtaagacggtaggacttcttatttaggagtatcctgatttaatgttaaacaatacgttttcggattgaaccggaaattaaatcgacaattgcgaccattagtactaaaccgattaatataatacctacacggtcccaagaacgtgtttgaatggcaaatatgagtggtgtcccgataccaccagccccaattagccccagtatagaagctgaacgtaagtttagttcaaagcgataaagtatgagtgatagaaaggcaggcataatttgtggtatgactgcaaatacgagtgttttaatcttattcgcaccactggcctttaatgattctacagcactgaaatctagaccttcaatatcttcagctaaaagtttcccaagcatacctacggaatggatacctaaagctaatacacctgaaaatgaacctgggccaacagctttgataaatataagtgccattacaatttctgggaagacacgtataacacttaaaataaatttgctaacacctgaaactgggcgtagctttaccatattatttgcacctagaaatgctaatggaatacagataattgcggcgatgaaagtacctacaacggctatcgcaaaggtttcaagtaaaccacgtaataagtcttcgccatctggtatatagatatagctgatatcaggatggaataatccgctgaatatggattttaagatttctaatgatttacttttaagttctaaacttggtacacctgcaaatgcccagatgataatagctaagacgacaattgcaataagccatcttttaatcaattttcgtttgtgtgcttttgtgtgaacattatattttgctatttcctgtgtcatgcgagatgtgccctcactttcgtactgatgtaatcaatgacgacgacgataactaaagtaaataaaataatcgttgctgtttttggatattgaaataaaccaagtgtttgatcataaaacaatccaataccgccagcgccgactaatccaagcacagctgaagcacgtatatttacttcaaatgcatataatacgtatgacataaatgacgatatggcttgtggtacaacaccgaaaacaatccattttattttattagcgccaacagccgtcattgcttccattggacctggatctatcgtttccaatgattcatataataattttccaataatacagatagttaaaataaacagtgctaatatccctggaatttgaccgattccaaatacagccacaaagattgctgctaataacaaatctggaatagtacgaactatatttaaaataaagcgcgagggtattgaaatccacttttgatgaacgatattgctagcacataataacgcaattggtattgaaacgatgctacctaatactgtacttacgatagccattcgaatggtatctaacattggcgttgtaatttgttgtaaatactcgaaatcaggtggaatcatttgtttgaatagatcacctatttgaggtattcctatcattaaatctccaaaattaaatcccgtataaatgaagctccaaatgataagcacaatgattaacatgaaggtaaaactcgtttttaaagaaacctttttctttaaaagggagtcatactttgtaggtatttctaaaggcatgttagttcactcctagcttttcatcttctttaattgtacgtccatatatttcactaaatacgtcatctgttgcttcagatgcaggaccatcatagacaacttcaccatcacgtaaaccaatgatgcgtgtgccatattcttttgccaagtcaacaaaatgtaaattaattaaaattgtgatgcctaattcttggttgatttttcttaaatcatccataacctgtttcgtagttaatgggtctaatgaagcaactggttcatctgcaagaataatttcagattcttggcatagcgcacgtgcaatagatatacgttgttgttggccacctgataattcatcagagcgttgattatatttatctaagatattgacgcgttctagtgcatccattgccttaattttgtcttcttttgggaataaacctaataccattttccaagtagggtgataacctacacgtccacttagtacatttcgtaatacacttgaccgtttaactaaattaaaatgttggaaaatcatacctatatttcggcgcatttctaataatgctttaccatgggctttagtgattgatttaccttggatgaaaatttcacctgacgtgatatcatgcaaacgatttacagatcttaataacgtggatttcccagcaccagatagtccgacaataactgcaaattcacctttttcaatatttaagttaatatttttcaagcctacatgaccgttaggatagactttactgacgtttttaaattcgatttgactcatgtttgacacctttctttaataaagaaaagccaaggtaaactgaaatatcatagacattgggtttctgtgtacaaatggtttcaaatgtacagcgacacctttctatatctgtttcagtttagcgcctagcttttcaatattaatctagaatatatctattgaacgaaagcttttaataccaaattcgctaatgattcatttgttaaataatgattatttcatatctttaactaatttttcgtactctcttacaatgtcgaaatttgaatctttcgtttctgtgtatccttcatgtgaataaacttcgctaataattttgtgaccttcttttgatttagcaatgtctataaaagcttttttcaatttttcttgaaaatctttatccatatctggtcttacagaaattgtgtcattcggaatagcttgtgttaattttaaaattcgtgtgtctttaaatacatttggttggtcttttttcacagtattacgtgcatcgttaaatacagccgcagcatctacatctccatttaataatgagataactgcttggtcatgacctttaacattcacaattttcatatctttagttgcattaatacctgcttcgttttttaacatcgcaagtgggaatgtatatccagcagttgatgttacatcttgtaaggcaattttcttaccttttaaatctttcaagcttttaatttttgagtcttttttaacaagaatttctgatttataactatctacaagttctttacttgctgaaccatcttcttttacaccgaaacgttgtgcttgtaataataaatcagctgctttttgatcatgtgctaatgtgtatgccgttggtggtaagaaaccaacatcaacttttttagacttcatagcttcaacaattgtattgtagttagttgatacagacactttaactggaatccctaattctttagatagtaatttttctaatggttttgctttagcttctaatgttccagcattttgcgaaggtacaaattgaacggttaattctttaggtttgtatcctcctgatttagaatccgaatcattactagcgttcttttgattatctaaagaacttgagtttccacatgctgctgcaaaaacaatgactgctaacattaatacaaataaacacttaaaatttttcatttgataactgtccccttcacattcttaatcgtgtaatatgtatgcaatgaaattacacttatagcgtaccacatttaaatgttaaaaagtattttataaaaatgaattttaataactttctttaagagtttgataagattttgtaaatttttcgttaaattgctcatatgcaacgaatttttatcctataattcaagaacaaatttattttaaaaggagcctcacaaaatgaaaaaaatatataagtcattaactgtctctgcaattgttgcaacggtatcattaagtgctttaccgcaatctttagctataacgcatgaatcgcaacctacaaagcaacagcgaacggtattattcgatcgttctcatggtcaaacagctggtgctgcagattgggttagtgatggtgcattttcagattatgcggattcaatacaaaaacaaggttatgacgttaaagctattgatggtcattcgaacataacagaagcaagtttgaaaagttccaaaatatttgtaattcctgaggctaacattcctttcaaagaatcagaacaggcagcaattgttaaatatgtgaaacaaggtggcaatgttgtctttatttcagatcattacaatgctgaccgaaatttaaatcgtattgattcatcggaggcaatgaatggttatcgacgtggagcatatgaagatatgtcgaaaggtatgaatgcagaagaaaaaagttctactgcaatgcaaggtgtgaaaagttcagattggttatctacaaactttggcgtacgttttcgatataatgcactaggtgatttaaatacgagcaatattgtttcttcaaaagaaagtttcggtattactgaaggtgtgaaatctgtctctatgcatgccggatcgacattagcaattactaatccagagaaagcaaaaggtattgtgtatacaccagaacaattgccagcgaaaagtaaatggtcacatgctgtagatcaaggtatttataatgggggcggtaaagcagaaggcccctatgtagcaatttctaaagttggaaaaggtaaagcagcatttatcggtgattcatcacttgtggaagatagttcgcccaaatatgtaagagaagataatggagaaaagaagaaaacatatgatggttttaaagaacaagacaacggtaagctattaaataatataacggcttggatgtctaaagataatgatgggaaatcacttaaggcgagtagcctaacattagatacaaagactaagttgcttgattttgaacgaccagagcgttcaactgagcctgaaaaagagccatggtcacaaccgccgagtggttataaatggtatgatccaacaacatttaaagcaggtagttatggcagcgaaaaaggcgcagatcctcagccaaacacaccagatgatcatacaccaccaaatcagaacgaaaaagtaacatttgatatcccgcaaaatgtttctgtaaatgagccatttgaaatgacaatacatttaaaaggatttgaagcaaatcaaacacttgaaaatcttagagttggtatttacaaagaaggcggacgtcaaatcggacaattttcaagtaaagataacgattataacccaccaggttacagtactttgccaacagttaaagcagatgaaaacggaaatgtcacaattaaggtcaatgctaaagtacttgaaagtatggaaggttcaaagattcgtttaaaactcggtgacaaaaccttgattacaacagacttcaaataaatatataatagaaataagaaagatgtttgtgattgaaggagtgagtgaggatgtcaaacatagcattttatgtcgtgagtgacgtacatggttatattttcccaacagattttacgagtagaaatcaatatcaacctatgggattgttactagcgaatcatgttatagaacaagacagaaggcagtatgaccaaagttttaaaatagataatggtgattttttgcaagggtcaccattttgtaattacttaatcgcgcatagcggcagtagccagcctttagttgatttttataatcgaatggcattcgactttggtacgcttggtaatcatgaatttaattatggattaccatacttaaaagacactttacgcagactcaattatccagttttgtgcgctaatatatatgaaaatgatagtacattgactgataacggtgtgaagtattttcaggttggagatcaaactgttggtgtgataggtttaacgacacaatttattccccattgggaacaaccagagcatattcagtcacttacgtttcatagtgcttttgaaatacttcaacaatacttacctgaaatgaagcgacatgcagatatcattgtggtttgttaccatggtggatttgaaaaggatttagaaagtggtacgccgaccgaagtattaacgggtgaaaatgaaggatatgccatgttagaagcgttttctaaagatatagatatctttattacgggtcaccaacatcgacaaattgctgaaaggtttaagcaaacggctgtgattcaacctggtacgagaggtacaactgtaggcagagtagtcttgagtactgatgaatatgaaaatctatccgttgaatcatgtgaattacttcctgttatagatgattccacatttactattgatgaagatgaccaacatttacgaaagcagttagaggactggttagattacgaaattactacattgccatatgatatgacgattaatcatgcatttgaggcacgtgtggcaccgcatccttttacaaattttatgaattacgctttattagaaaaaagtgacgcagatgttgcctgtacagctttgtttgattctgctagtggtttcaagcaagtcgtgacgatgcgagatgttattaacaattacccatttccaaatacatttaaagttttagctgtaagtggtgccaaacttaaagaagccattgaacgatcagcagaatattttgacgtgaaaaatgatgaagttagtgtgagcgcagacttccttgaacccaaaccacaacactttaattatgatatatatggtggcgtaagttataccattcatgttggaagaccaaagggacaacgtgtgagcaatatgatgattcaaggtcacgcagttgatttaaagcagacatatacaatttgtgtaaataattatcgtgcagtaggcggtggtcagtatgatatgtatatcgacgcgccagttgtaaaagatattcaagttgaaggcgcacaattacttattgattttttatcaaataataatttgatgcgcatcccgcaagttgttgattttaaagttgaaaagtgacggatatatgtaaaacttacttgattttaatcgggtaagtttttgtttttgtttaaagcgagaaagtattatctttagacgacgtgattgaaatgtcacgtcctgtcaaaatgaatagtttattaaagttgtattttgatagaaatttactgacaccacaaaaattattgaattatttaaaagttgatgaaacatttttgaatcatctagcaggtattaatttaaaactctttaaggattatgttaatgaaaatagagaatataatataacgaatctatataaataaggcaccaatatttaaacctcgagctgaaaagatcatcatttcagttcgaggttttttattttatcctctttgtatgggtattcttttacttgaaatttgttttcctgtttttttattgtaaatttttattacatagtatcctaagttatatcctgacatttgttctccagtatttttagttttttagtaggaacataatggtatttttttgctgttagtggaacatattttttagtgttttgaatttcgtttcatccatttgtaaaactggatactctaatatccggtaatagccggttaaatcgacataggatgtcactagctattccaaaattgtcttttgacgctataacgattgttgggaatcttagcatgtctaacgcagagagactttcacattttatgagtactaatcctgaaattcggctttgggatattttacaaacaaactttaaagctaaagctcttaaagaaaaagtttatattgaatatgacaaaataaaagcaactctttggaatagacgtagtatgcgcgttgaatttaatcctaataagctttcgcatgatgaagtgctttggttaaaacaaaatatcatcagttatttggacgatgttagttttacgagattagatttggcttttgattttgaatttgatttaaatgactattatgcattgtcagataagtcggtaaagaaaactatattttatggacgtaatgtaaaaccagaaacaaaatattttggtgtgcgtaatagtgataggtttattcggatttataataaaaacaagaacgtaaagataatgcagatgttgaaattgattcaacatttctatggcgtgtggaaattgaattaaaacgagatatggttgattgttggaaagattgttttgatgatttgcatattttaaaaccgaatttaaaaatgattgaaaatatacaagaacgagcaatgcttcatttattaactcacgaagaagaggaatggggaaatttagaaagacgtactaaaaataaatatagagataagttgaaaaatatagcgtctattgatttgacagatttaatgaaaatatctttaagaggaaatgaaaaccaattgcaaaaacaaatcgacttttggttgaattaattattataactaaagaactatgttcacttatgctcatctacttaaaataagtatttttttgttggtttttaaaagtagttgaaatgtttataataatattgaaagatatttctgttttccttttgaataataaacttaaaagagaatataaaataatgcttattaaaattaggggtggaaatatgaaaagagatttttttgaaaagtggtcgtttattttaaatttaattttattttgtgcttttttgtttttagtggttctgatgttttataaggatgtcgatttgatttatattttttgtacattattaatatcattattacctttgctaaatattataaaaagatataagaaaaagacggataattaatccgtcttttttttatgaaaagaataggctgggaaataaatcaatgttctatgatctacgaagttatattggcagtaattgactgaacgaaaatgcgcttgtaataagcttttttcaattctagtcaggggccccaacacagagaatttcgaaaagaaattctacaggcaatgcgagttggggcggggccccaacaaagagaaattggattcccaatttctacagacaatgcaagttggggtgggacggcgaaataaattttgcgaaaatatcatttctgtcccactccccagaaaaggttctaccattgtcaaaaaaatgcatctctacatgttagagtaaatattggtcagccaaccaaaataatcaacacgaggagatgctatttaatgtcatctgacacaaacagtttagcacatacgaaatggaattgtaagtaacatattgtctttgcacctaaatacagaagacaagcgatatatggaaaaataaaaaaagatatagggattatattacgtcaattatatgaaagaaaaggtgtagagataattgaagcagaggtatgtaaagatcatatccatatgttagtaagtataccacccaaacttggggtatcatcatttgttggctatttaaaaggaaaagtaatttaatgatatttgatagacatgctaacttaaagtatagatatggaaatagaaagttttggtgtaaaggattttatgtggatacagtaggtagaaataaaaaagtgattgaaaattatattcgtaatcaattacaagaggatatcgttgcagatgaaatttcaatggaagaatatttagatcctttcactggagagaaaaataaaaaaagaaagaaaaaagagtaaacctttaggattgctggaatagtagtgcagttggctgacttgtcagtgcccttttagggctggccagtaaggaaggcttatagccgcagaacaaaccacccgttcacacgggtggtttttatttgtaacatctgttgataggtatcgacaaggaccttttaatgttgtgttttgtgcgatataacaagctttttaggctattaaagaatattcagaattaaatatataattatgaataaattatgtcattgaaaaaattatgattataaaatcattctaaaaacaccgaaataacaatgatttcatgaaaacatttattttaaaatttgatatttgttcaaataatattcgaaattaaacttttttgtatagaattttctttatatcctgagagacatgtactataatgtttgtgaaataattcacaaagtataaaggagtggttgtatatgttaactatacctgaaaaagaaaatcgtggatcgaaagaacaagaagtggcaattatgattgatgctctagctgacaaagggaaaaaagcattagaagcattatctaaaaagtcacaagaagaaattgatcatattgttcatcaaatgagcttagcagctgttgatcaacatatggtgctagcaaaattagcacatgaagaaactggaagaggtatatacgaagataaagcgattaaaaatttatacgcttctgaatatatatggaattcaataaaagacaataagacagtagggattattggtgaagataaagaaaaaggattaacgtatgtagcggaaccaattggtgttatttgtggtgttacgccaacaacaaatcctacgtcgacaactatttttaaagcgatgattgcaattaagacaggaaatccaatcatttttgcattccatccaagtgcacaagaatcgtcgaagcgtgcagcagaagttgtattagaagcggcaatgaaggcaggtgcacctaaagatattattcagtggattgaagtgccttctatcgaagcaacaaaacaattaatgaatcacaaaggtattgcattagttctagcaacaggtggttcgggcatggttaagtctgcatattcaactggcaaaccggcattaggtgtgggaccaggtaacgtgccgtcttacattgaaaaaacagcacacattaaacgtgcagtaaatgatatcattggttcaaaaacatttgataatggtatgatttgtgcttctgaacaagttgtagtcattgataaagaaatttataaagatgttactaatgaatttaaagcacatcaagcatactttgttaaaaaagatgaattacaacgcttagaaaatgcaattatgaatgaacaaaaaacaggtattaagcctgatattgtcggtaaatctgcagttgaaatagctgaattagcaggtatacctgtccccgaaaatacaaaacttatcatagccgaaattagcggtgtaggttcagactatccgttatctcgtgaaaaattatctccagtattagccttagtaaaagcccaatctacaaaacaagcatttcaaatttgtgaagacacactacattttggtggattaggacacacagccgttatccatacagaagatgaaacattacaaaaagattttggactaagaatgaaagcttgtcgtgtacttgtaaatacaccatcagcggttggaggtattggtgatatgtataacgaattgattccgtctttaacattaggttgtggttcctacggtagaaactcaatttcacataatgttagtgcgacagatttattaaacattaaaacgattgctaaacgacgtaataatactcaaattttcaaggtgcctgctcaaatttattttgaagaaaatgcaatcatgagtctaacaacaatggacaagattgaaaaagtgatgattgtctgtgaccctggtatggtagaattcggttatacaaaaacagttgagaatgtattaagacaaaaaacggaacagcctcaaataaaaatatttagcgaagtcgaaccgaacccatcaactaatacagtatataaaggtctggaaatgatggttgatttccaaccggatacaatcattgcacttggtggtggttcagcgatggatgctgcaaaagcaatgtggatgttctttgaacaccctgagacatcattcttcggtgctaaacaaaagttcctagacatcggtaaacgtacttataaaataggcatgcctgaaaatgcgacgttcatttgtatccctacgacatcaggtacaggttcagaagtaacaccatttgcagttatcacagatagtgaaacaaatgtaaaatatccgttggctgattttgctttaacacctgacgttgcaattattgaccctcaatttgtgatgagtgtgccaaaaagcgttacagcagatacaggaatggatgtactaacgcatgcaatggaatcatatgtatctgtaatggcttcagactacacaagaggtttgagtctacaagcgattaaattgacgttcgaatatttaaaatcatctgttgaaaagggtgataaagtttcaagagagaaaatgcataacgcatcaactttggctggtatggcatttgcaaatgcattcttaggcattgcacactcaattgcgcataaaattggtggcgaatatggtattccgcatggtagagcgaatgcgatattactaccgcatattatccgttataatgccaaagacccgcaaaaacatgcattattccctaaatatgagttcttcagagcagatacagattatgcagatattgccaaattcttaggattaaaaggtaatacgacagaagcactcgtagaatcattagctaaagctgtctacgaattaggtcaatcagtcggaattgaaatgaatttgaaatcacaaggtgtgtctgaagaagaattaaatgagtcaattgatagaatggcagagctcgcatttgaagatcaatgtacaactgctaatcctaaagaagcactaatcagtgaaatcaaagatatcattcaaacatcatatgattataagcaataatctatctgataataatcatctaactcacctgaaattacaaaagtaaaaaatgccacataaactttaagtcgataatcattatacggttatcggcttttatttattgccaaatcttcagagagatacaaactagacaatcatttttttaaataaagaaaatattaagattgatactcatttcacaaactattactactttagagtataattatttttaatttcatataaataaaaaggcgaaaataatgcggtttaaaagtaattaattgtttaaacgatatgtaatatgtaaatactatatatataataccaattttaatgaaaatttttaagggaggtaaataatggaaagtacattagaattaacaaaaattaaagaagtattacaaaaaaacttgaagattttaattattttaccgctattatttttaattattagcgctattgttacatttttcgtcttatcacctaaatatcaagctaatactcaaattttagtgaatcaaactaagggtgacaatcctcagtttatggcgcaagaggttcaaagtaatattcaacttgtaaatacgtataaagaaattgttaaaagtcctagaattttagatgaggtgtcaaaggacttaaatgataagtattcaccatctaaattgtcgagtatgttgacaattacaaaccaagaaaatacgcaacttatcaacatccaagttaaaagtggtcataaacaagattcggaaaaaattgcgaatagcttcgctaaagttacaagtaaacaaattccgaagattatgagtgtggataacgtatcaattttatctaaagcagacggtacagcagttaaagtcgcaccaaaaactgtagtgaatctaatcggtgcattctttttaggattagttgtcgcgcttatatatatcttcttcaaagtaattttcgataagcgaattaaagatgaagaagatgtagagaaagaattaggattgcctgtattgggttcaattcaaaaatttaattaaggatggttgctacttatgtcaaaaaaggaaaatacgacaacaacactatttgtatatgaaaaaccaaaatcaacaattagtgaaaagtttcgaggtatacgttcaaacatcatgttttcaaaagcaaatggtgaagtaaagcgcttattggttacttctgaaaagcctggtgcaggtaaaagtacagttgtatcgaatgtagcgattacttatgcacaagcaggctataagacattagttattgatggcgatatgcgtaagccaacacaaaactatatttttaatgagcaaaataataatggactatcaagcttaatcattggtcgaacgactatgtcagaagcaattacgtcgacagaaattgaaaatttagatttgctaacagctggccctgtacctccaaatccatctgagttaattgggtctgaaaggttcaaagaattagttgatctgtttaataaacgttacgacattattattgtcgatacaccgccagttaatactgtgactgatgcacaactatatgcgcgtgctattaaagatagtctgttagtaattgatagtgaaaaaaatgataaaaatgaagttaaaaaagcaaaagcacttatggaaaaagcaggcagtaacattctaggtgtcattttgaacaagacaaaggtcgataaatcttctagttattatcactattatggagatgaataagtatgattgatattcataaccatatattgcctaatatcgatgacggtccgacaaatgaaacagagatgatggatcttttaaaacaagcgacaacacaaggtgttacagaaatcattgtaacatcacatcacttacatcctcgatataccacacctatagaaaaagtgaaatcatgtttaaaccatattgaaagcttagaggaagtacaagcactaaatctaaagttttattatggtcaggaaataagaattaccgatcaaatccttaatgatattgatcgaaaagttattaacggtattaatgattcacgctatttactaatagaatttccatcaaatgaagttccacactatactgatcaattatttttcgaattacagagtaaaggctttgtaccgattattgcacatccagagcggaataaagcaataagtcaaaaccttgacatactatacgatttaattaacaaaggtgctttaagtcaagtgacaacggcgtcattagcgggtatttccggtaaaaaaattagaaaattagcaattcaaatgattgaaaacaatctgacacatttcatcggttcagatgcgcataacacagaaatcagaccgttcttaatgaaagacttatttaatgataagaaattacgtgattattatgaagatatgaacggatttattagtaatgcgaagttagttgttgatgataaaaaaattcctaaacgaatgccacaacaagattataaacagaaaagatggtttgggttataaacagcaaatgaggggttttatggcacatttatctgtgaaattgcggcttttaatactagcattaatcgattcactgatagtgacattttcagtattcgtaagttattacattttagaaccgtatttcaaaacatattctgtcaaattattaatattggcagctatatcactattcatatcgcatcatatttcagcatttatttttaatatgtatcatcgagcgtgggaatatgccagtgtgagtgaattgattttaattgttaaagctgtgacgacatctatcgttattacgatggtggtcgtgacaattgttacaggcaatagaccgttttttagattgtatttaattacttggatgatgcacttgattttaataggtggctcaaggttattttggcgtatttatcggaaataccttggaggtaagtcatttaataagaagccaactttagttgttggtgctggtcaagcaggttcaatgctgattagacaaatgttgaaaagtgacgaaatgaaacttgaaccggtattagcagtcgatgatgacgaacataaacgcaatatcacaattactgagggtgtaaaagtccaaggtaaaattgcggatattccagaactagtgaggaaatataagattaaaaaaatcatcattgcaattccaactattggtcaagagcgtttgaaagaaattaataatatttgccatatggatggcgttgagttattgaaaatgccaaatatagaagacgtcatgtctggtgagttagaagtgaaccaacttaaaaaagttgaagtagaagatttactaggcagagatcctgttgaattagatatggatatgatatcaaatgaattgacgaataaaactattttagttacgggtgcaggtggttcaataggatcagaaatttgtagacaagtttgtaatttctatccagaacgtattattctacttggccatggtgaaaacagtatttatttaatcaatcgtgaattgcgaaatcgcttcggaaaaaatgttgatatcgttcctattatagcggatgtgcaaaatagagcgcgtatgtttgaaattatggaaacgtataaaccatacgcagtttatcatgcagcagcacacaagcacgtgccgttaatggaagacaaccctgaagaagcagtacgtaataatattttaggtacgaaaaatactgctgaagctgctaaaaatgcagaggtaaagaaattcgttatgatttctacggataaagccgttaatccgcctaatgtcatgggagcttcaaagcgaattgcagaaatgattattcaaagtttaaatgatgaaacgcatcgaacaaattttgttgcagtgagatttggtaatgtacttggatcgagaggatctgtgattccacttttcaaaagtcaaattgaagaaggtgggccagttactgtgacacatcctgaaatgacacgttactttatgacaattcctgaagcttctagactagttttgcaggcaggggcattagcagaaggtggcgaagtatttgtgctagatatgggagaaccagtgaaaattgtagatttggcacgtaatttaattaagctaagtggtaaaaaagaagacgacatacgcattacttatacagggattagacccggcgaaaaaatgtttgaagagcttatgaataaagatgaggttcatcctgaacaagtatttgaaaaaatttatcgtggcaaagtacaacatatgaaatgtaatgaagttgaagcgattattcaagacatcgtcaatgactttagtaaagaaaaaattattaactatgccaatggcaaaaagggagataattatgttcgatgacaaaattttattaattactgggggcacaggatcattcggtaatgctgttatgaaacagtttttagattctaatattaaagaaattcgtattttttcacgcgatgagaaaaaacaagatgacattcgaaaaaaatataataattcaaaattaaagttctacattggtgatgtgcgtgatagtcaaagtgtagaaacagcaatgcgagatgttgattacgtattccatgcagcagctttaaaacaagtgccgtcatgtgaattctttccagttgaggcagtgaagacaaatattattggtacagaaaatgtcttacaaagtgctattcatcaaaatgttaaaaaagtcatatgtttatctacagataaggcagcgtatcctattaatgctaggggtatttcaaaagcaatgatggaaaaagtattcgtagccaaatcaagaaatattcgtagtgaacaaacgcttatttgtggtacaagatacggtaatgtgatggcttcaagaggatcagtaatacctttgtttatcgacaaaatcaaagctggagaacctttaacgattacagatcctgatatgacaagatttttaatgagcttagaagatgcggtagaactagttgttcatgcatttaagcatgcagagacaggagatattatggttcaaaaagcaccaagctcaacggtaggggatcttgcgaccgcattattagaattgtttgaagctgataatgcaattgaaatcattggtacgcgacatggagagaaaaaagcagaaacattgttgacgagagaagaatacgcacaatgtgaagatatgggtgattattttagagtgccggcagactccagagatttaaattatagtaattatgttgaaaccggtaacgaaaagattacgcaatcttatgaatataactccgataatacacatattttaacggtggaagagataaaagaaaaacttttaacactagaatatgttagaaacgaattgaatgattataaagcttcaatgagataggagagattgacgttgaatattgtaattacaggagcaaaaggttttgtaggaaaaaacttgaaagcagatttaacttcaacgacagatcatcatattttcgaagtacatcgacaaactaaagaggaagaattagagtcagcattgttgaaagcagactttgtcgtgcatttagcgggtgttaatcgacctgaacatgacaaagaattcagcttaggaaacgtgagttatttagatcatgtacttgatatattaactagaaatacgaaaaagccagcgatattattatcgtcttcaatacaagcaacacaagataatccttatggtgagagtaagttgcaaggggaacagctattaagagagtatgccgaagagtatggcaatacggtttatatttatcgctggccaaatttattcggcaagtggtgtaagccgaattataactcagtgatagcaacattttgttacaaaattgcacgtaacgaagagattcaagttaatgatcggaatgttgaactaacgctaaactacgtggatgatatcgtcgctgaaataaagcgtgctattgaaggaactccaacgattgaaaatggtgtacctacagtaccaaacgtatttaaagtgacattgggagaaattgtagatttattatacaagttcaaacagtcacgtctcgatcgaacattgccgaaattagataacttgtttgaaaaagatttgtatagtacgtatttaagctatctacctagtacagactttagttatcccttacttatgaatgtggatgataggggttcttttacagaatttataaaaacaccggatcgtggtcaagtttctgtaaatatttctaaaccaggtattactaaaggtaatcactggcatcatactaaaaacgaaaaatttctagtcgtatcaggtaaaggggtaattcgttttagacatgttaatgatgatgaaatcattgaatattatgtttctggcgacaaattagaagttgtagacataccagtaggatacacacataatattgaaaatttaggcgacacagatatggtaactattatgtgggtgaatgaaatgtttgatccaaatcagccagatacgtatttcttggaggtatagcgcatggaaaaactgaaattaatgacaatagttggtacaaggcctgaaatcattcgtttatcatcaacgattaaagcatgtgatcaatattttaatcagatattagtacacactggtcaaaattatgattatacattgaatcaaattttctttgatgatttggaattaagacaaccggaccactacttagaggcagttggaagtaaccttggagaaacgatggggaatattattgcgaagacatatgatgttttattacgcgaacaaccagatgcacttttaattcttggtgatacaaatagttgtttagcagcagtatctgctaaacgattaaagattcctgtgttccacatggaagcgggtaatagatgctttgatcagaatgtacctgaagaaatcaatcgtaaaattgttgaccatgtcagtgatgtgaatctaccttatacggaacatagcagacgttatttattagatgaaggcttcaataaagcgaatatctttgtgacaggatcaccgatgacagaagtgatagaagcgcatcgagataaaattaatcacagtgacgttttaaataaactaggattagaaccgcaacaatacattttagtatctgcgcatagagaagagaatatcgataatgaaaagaattttaaatcattaatgaatgcgataaatgatattgccaaaaagtataaaatgcctgtgatttattcaacgcatccaagaagttggaagaaaattgaagaaagtaaatttgaatttgatccattagttaaacagttaaagccatttggtttctttgattataatgcattgcaaaaagatgcatttgttgtgctatcagatagtggaacattgtcagaagagtcgtctattttgaagttccctggtgtccttattcgaacttccacagaaagaccggaagtactagataaaggtacggttattgtaggtggtattacctataacaatctaatccaatccgttgaactagcaagagagatgcaaaacaataacgaaccgatgattgatgctattgattataaagacactaacgtttcgacaaaggtagttaaaattattcaaagctataaagatattatcaatcgaaatacttggaggaaatgacgatgaggatagcgattgaaaagataattggtttgctgaaaaaccagtcctctaaagaatcgaatgttaagattcatcgcttggcgtatattacaaactcaaaatttgatggcaataactatatagatagatggtgtaaaatcaggaattctcacattggtgaatacagttatattggatttggtagtgattttaataatgtagaagtaggaagatattgttcgatatcttcggatgtaaaaattgggttaggaaaacatcctacacacttttttagctcatcaccgattttttattctaataataatccatttaacataaagcaaaagtttatagactttaatgaccaaccaagccgtacaacaattaaaaatgatgtgtggattggtgcaaatgtaattattatggatggtttaacaataaatactggtgcagtcatagcagccggctcagttgttactaaaaatgtaggagcatatgaggttgttggtggtgttcctgcaaaagtgattaagaagcgatttgacaataaaacaattgaaaaacttttggaaagcaagtggtgggagaaaacgcctgacaaactaaaaggattttcggttgaatatttaaataaaaaggatacttaatgatatgagaattttaaatattgtatcgagtaatattgttcaagacccaagggtacttaaacaaatagaaacaattaaaggcgttacggatgattataaaattgttggaatgaataattcacaagctactaataagcgattggaaaatttagattgtaattatcgtttgttaggtagcaaggtagatccaaaaaatattctttctaaattaattaagcgtataagatttgcaacaggtgttatccgagaaattaaagcttataaacctgacgtgattcatgcaaatgatttcgacgtattattaatggtctatttaagcaattataaaaaagctaatattgtttatgatgcgcatgaaatatatgcgaaaaatgcctttattaataaagttccacttatttcaaagtttgtagaaagtatagaaaaacacatagtaaaacatcgtgttaatgccttcgtaacagtaagtcatgcagcaaaagaatattatcaatctaaaggatataagaaggaagcgaatgttattacgaatgcacctattttaaatgatagcagagaatttaaagaaatcgaaaactttaaagaaattgtatatcaaggtcaaattgtaatggacagaggatatgaagagtttattattgcttcatcagcttttaaacaaaatgctccttcattcataattcgagggtttggtccgcatgaagaagtgataaaagaactgattagttataacccggaaaatattaggttggataaaccagttgaagtaaaagaattggttgataagttagcagaaagtaatgttggtgttgtcttgacgaaaccagtatctattaattttgaatatacagtatctaataaaatttttgaatgtatacatgctggtttaccagtaattttatctcctgtcaaagagcatatttatctcaatgaaaaatataaatttggcattgttctaaaggaagttacgccgttagaaattgaaaaggcggttagaaaattaagagataatcacgatttgtttaatcatttacgtcaaaatgcaattaaggcgtctaaaattttgaattggcaaatagagagtgaacggttagtagaattatataaattttaaagagaggtagactatgaaattttttgtactttgtgcaattatcagcatgaacatatttatagtaatctctacatttactaaagaagtattagggttccctatagagccggtgtattactcaaccatggttggtatagcattaattactacggtgtttgctatttataagataattgtcacccaagaaattccgcgagggttaatattattaattgctatatgtttgctttatctagctttttattatttttcaccagataaggaagagaaactagctaaaaataatattctattctttttaacatgggcagttccagcggcaattagtggtatttatattaaatatataaacaaggctacggtagaaagattttttaaattagtatttttcatattttctgtttcatttatttttgtaattttaataccaaaacttacaggtgagatacctagctatatcaattttggacttatgaactatcaaaacgcttcgtacctttcagcatttactgccggattaggcatttatttcattatgaaaggttcagttaaacataagtggatatatgttctatttacaataattgatatccctattgtgtttataccaggagggcgtggaggtgctattttattaattctttacggcttatttgcatttatacttattacgtttaaaagaggaatacctatcgcagtaaaaagcattatgtatatttttgcattaagcatatctagtgtattgatttactttctttttacaaaaggttcgaatactagaacattttcatatctacaaggtggaacacttaatttagaaggtacttctggaagaggaccgatttatgaaaaaggtatttactttattcaacaaagttcgttattaggctatgggccatttaactattataaactaatcggaaatataccacataacatcattattgagttgattctatcatttggcttattagggttttttatcataatgatttgcattttgctactagtttataaaatgattaggaactatgatccaaacactatagatttactcgttatgtttatagcaatctatccaatcacattattaatgtttagttcaaattatttagttgtaagtgaattttggtttgtgttgttctattttattacaaaaggacggcgtcatcatggctaagaaagtttttattatggatagcgtaaagacaataattggtacgttgcttatagctttaggattacaatttttagcttatccaattattaatcaacgagtaggtaatgaagcgttcggttctattttaacgatttatacaataataacaatcacgagtgttgtattaggcaatacgcttaacaatatacgattgattaatatgaatctatacaaatccaatcattactactggaaatttgcatcgatacttttaatctcaattctgattgagagtatagctttaattattgtatttctttacttttttaatttgaacatcatcgatattatctttttaattctacttaatattttaatgtgtttaaggatttatctgaatgtattttttaggatgactttaaaatataatcagattttgtatattgctcttattcaatttttaggtttgctgataggactatttctatattatttaacccaaaactggattgtttgttttattaccagtgaattgtttgcaacgatatatacattggttaaattacggggattaactataggcgagtatcaaagtgaagataataatgtggtaaaagattatgtgatgctactgagtacaaatagccttaataatttgaatctctatttagatagattaatcttattaccaattataggtggaacagctgtaactatatcatttctttcaacatttattgggaaaatgttagctacatttctatatccgattaataatgtagtactttcatatatttctgtaaatgaaagtgacaatataaagaagcaatatttgaaaactaatctaattgctatagctgccctatgtttagtcatgattatatgttatccaattacaataattattgtctctttactgtataacattgattcaagtttatattcgaagtttattattttaggtaatataggtgttttattcaatgcagtgagtattatgatccaaactttaaatacaaaacacgcatcaataacattacaagcgaattatatgacgcttcacacgattacatttatattcataactattttaatgacaattgcgtttggtctaaatggattcttttggacaacgctgttcagcaacattattaagtatgtgattttaaatattataggtttaaagtctaaattcattaataaaaaggacgtcgattagatgagtgaaaaaaagattttgattttatgtcagtatttttatccggaatatgtatcttctgcgacgttaccaactcaattggcggaagatttaattgcgaatcacattaatgtcgatgtcatgtgtggatggccatatgaatatagtaatcataaacaggtttctaaaaccgagatgcatcgtggtattcgcattcgacgtctcaagtattcgaggtttaataacaaaagtaaggttggaaggatcatcaatttctttagtttattttcaaaattcgtgattaatatacctaaaatgttgaaatatgatcagattcttgtttactctaatccaccaatcttgccattaataccagacgttttacacagactgcttaagaaaaaatattcttttgtggtgtatgatatagcacctgataatgcgattaagacaggtgcaactcgtccaggtagcatgattgataagctgatgcgttacattaatagacatgtctacaagaatgctgaaaatgtcattgtccttggtacggaaatgaaaaactacttactaaatcatcaaatttctaaaaatgctgacaatatccatgtgattcctaactggtatgacatgcgtcaattacaagacaatcgtatctataatgacacatttaaagcttaccgtgagcaatacgacaaaattttattgtatagcggtaatatggggcagttacaggatatggagacacttatctcatttttaaaattaaataaggatcagtctcaaacgttaacaatactttgtggtcatggtaagaaatttgcagatgtcaaaacggcaatagaagaccatcgtattgaaaatgttaaaatgtttgagtttttaacaggtacagactatgctgacgtattaaaaattgcggatgtatgtattgcatcgctgattaaagaaggcgtcggtttaggcgtgccgagcaagaattatggctatcttgcagctaagaaagcgttggtactcatcatggataagcaatctgatatcgttcaacatgttgaacaatatgatgcgggtatccaaattgataatggcgatgcacatgccatttataacttcatcaacactcactcgagtaaggaattgcacgagatgggtgagcgcgcacatcaactgtttaaagataaatatacgagagaaattaatactatgaagtattacaatctgttgaagtgaggagataattatgaagcgattattcgatgtagtgagttcaatatatggtttagtagttttaagtccgattctgttaattacagcattactaattaaaatggaatcacctggaccagccattttcaaacaaaaaagaccgacgattaataatgaattgtttaatatttataagtttagatcaatgaaaatagacacacctaatgttgcaactgatttaatggattcaacatcgtatataacaaagacagggaaggtcattcgtaagacctctattgatgaattgccacaattattgaatgttttaaaaggagaaatgtcaattgtaggtcctagaccagcgctttataatcaatacgaattaatcgaaaaacgtacaaaagcgaacgtgcatacgattagaccaggtgtgacaggactagctcaagtgatggggagagatgatatcactgatgatcaaaaagtagcgtatgatcattattacttaacacatcaatctatgatgcttgatatgtatatcatatataaaacaattaaaaatatcgttacttcagaaggtgtgcatcactaatgagaaaaaatattttaattacaggcgtacatggatatatcggtaatgctttaaaagataagcttattgaacaaggacatcaagtagatcaaattaatgttaggaatcaattatggaagtcgacctcgttcaaagattatgatgttttaattcatacagcagctttggttcacaacaattcacctcaagcaaggctatctgattatatgcaagtgaatatgttgctgacgaaacaattggcacaaaaggctaaagctgaagacgttaaacaatttatttttatgagtactatggcagtttatggaaaagaaggtcatgttggtaaatcagatcaagttgatacacaaacaccaatgaaccctacgaccaactatggtatttccaaaaagttcgctgaacaagcattacaagaattgattagtgattcgtttaaagtagcaattgtgagaccaccaatgatttatggtgcacattgcccaggaaatttccaacggttaatgcaattgtcaaagcgattgccaatcattcccaatattaacaatcagcgcagtgcattatatattaaacatctgacagcatttattgatcaattaatatcattagaagtgacaggtgtgtaccatcctcaagatagtttttactttgatacatcgtcagtaatgtatgaaatacgtcgccaatcacatcgtaaaacggtattgatcaacatgccttcaatgctaaataagtattttaataagttgtcggtctttagaaaattattcggcaatttaatatacagcaatacgttatatgaaaataataatgcacttgaaattattcctggaaaaatgtcacttgttattgcggacatcatggatgaaacgacaaccaaagataaggcataagtcatctattaaataaaatcaacatacaaatcgttttatttggaggttatagtatgaagttaacagtagttggcttaggttatattggtttaccaacatcaattatgtttgcaaaacatggcgtcgatgtgcttggtgttgatattaatcagcaaacgattgataagttacaaagtggtcaaattagtattgaagaacctggattacaagaggtttatgaagaggtactgtcatcgggaaaattgaaggtatctacaacgccagatgcatctgatgtttttatcattgccgttccgacgccgaataatgatgatcagtaccggtcatgtgacatttcgctagttatgcgtgcattagatagtattttatcatttttagaaaaaggaaataccattattgtagagtcgacaattgcgcctaaaacgatggatgattttgtaaaaccagtcattgaaaatttagggtttacaataggtgaagatatttatttagtgcattgtccagaacgtgtactgccaggaaaaattttagaagaattagttcataacaatcgtatcattggcggtgtgactgaagcttgtattgaagcgggtaaacgtgtctatcgcacattcgttcagggagaaatgattgaaacagatgcacgtactgctgaaatgagtaagctaatggaaaacacatatagagacgtgaacattgctttagctaatgaattaacaaaaatttgcaataacttaaatattaatgtattagatgtgattgaaatggcaaacaaacatccgcgtgttaacatccatcagcctggtccaggtgtaggcggtcattgtttagctgttgatccgtactttattattgctaaagaccctgaaaatgcaaagttaattcaaactggacgtgaaattaataattcaatgccggcctatgttgttgatacaacgaagcaaatcatcaaagtgttgagcgggaataaagtcacagtatttggtttaacttataaaggtgatgttgatgatataagagaatcaccagcatttgatatttatgagctattaaatcaagaaccagacatagaagtatgtgcttatgatccacatgttgaattagattttgtggaacatgatatgtcacatgctgtcaaagacgcatcgctagtattgattttaagtgaccactcagaatttaaaaatttatcggacagtcattttgataaaatgaagcataaagtgatttttgatacaaaaaatgttgtgaaatcatcatttgaagatgtatcgtattataattatggcaatatatttaattttatcgacaaataaaatgtgtcaaactagggcatacatgattaaggaaagataagctgtcatgtgtttgaacttcagagaggataatgttatgaaaaaaattatggttattttcggtacgagacccgaagcaataaaaatggcaccattagtaaaagaaattgatcataatgggaactttgaagcgaacattgtgattacagcacaacatagagatatgttagatagtgtgttaagtatatttgatattcaagctgatcatgatttaaatattatgcaagatcaacaaacattagcaggccttacggcgaatgcacttgctaaacttgatagcatcattaatgaggaacaaccggatatgattttagtacatggtgatactacaacgacttttgtaggaagtttggcagcattttatcatcaaattccggtcggacatgtagaagctggacttcgaacacatcagaaatactcaccatttcctgaagagttaaatcgagtcatggtaagtaatattgctgaattgaattttgcgccaacagtaattgcagctaaaaatttactttttgaaaacaaagacaaagagcgtatctttattactggaaatacagttattgacgcattgtcaacaacagttcaaaatgattttgtttcaacgattattaataaacataaaggcaagaaagttgttttactaacagcgcatcgtcgtgaaaatattggggaaccgatgcatcagatttttaaagcagtaagagatttggcagatgaatataaagatgttgtcttcatttatccaatgcatcgtaatctaaaggtaagagcgattgccgaaaaatatttatctgggagaaatcggattgaattaattgagccattagatgcgattgagttccataattttacaaatcaatcgtacctcgtgctgacagattctggtggtattcaagaggaggctcctacatttggaaaacctgtgttggtattaaggaatcatacagagcgtcccgaaggcgttgaggcgggaacatcgagagtaattggcacagattatgacaatattgttcgaaatgtgaaacaattgattgaggatgatgaagcgtatcaacgtatgagtcaagcgaataatccatatggtgatggacaagcatcacgacgtatttgtgaagcaatagaatattattttggattgcgcacagacaagccggatgaattcgtacctttacgtcacaaataataaaaaacccctaatcatgaagttggtttagacaaccagcggtgactaggggtttttaatatatttatttttgatagtggtagccaatatcatatttgaatactttatttgataatattggactttgctgtccatcgtcatcactttttaaacgtacatttttatgagcttctttaaatacatcggaattcaaccaattattaaagctatcttcagattcccaaatagttaagattttaacttcgtctgtatcctcggtatttaatgttttagtgacaaacatttgttggaagccttcaatagtttcaataccttgtctattgtaaaaacgttcaatcgtttcttccgcactgcctttttgtaattgtaatctattttctgccataaacatgggcaatcactcctctattttatgatttgatttgggtaatgtttttacaaatgtaaagagtacagcggtttgtatgataaccattatgattaatcctacacggactgcaagaacatccaccatataaattgaaaaacctattacaatgtataagctaattaaaattttaattttctgttgtagcgtgtagcctcgatgtaaataaaagttttctacatattctttataaattttttgattaataagccaattgtaaaagcgatctgaacttcgagcaaagcaaaaaactgctacgagtaaaaaaggggtcgttggcagtaaaggtaatacggcacctgcaataccaagcgctgtaaatattaagccaatgacgattaaaataagtcgcattgaaaaaactccattctagtactaatgcgcatgtaatattgttttagtaatataactcatgctaaatataatgtgtatgataagtgcaatgactcagtaaaatgaaacgatgttgaattatccttgtcacattaacgcattttaagcgcgactttcataacaaccaaactatttaatgagaattattctcaagtattatagttatattatgtgttttatttttgaaaagtgcaatatgttttcgaaaataagattatttttatgtgcaaaaacgacgcaaaagttttaaaaatgagacttctgtgagctgattattttataaaatgtaaacgcttactatataatgtgaatcatatcgtttaaaagcattattaaatatgatgctaagagatttatattatagccaataaacaaaggagagataatatggcagtaaacgttcgagattatattgcagagaattatggtttatttatcaatggggaatttgttaaaggtagcagtgacgaaacaatcgaagtgactaatccagcaactggagaaacactatcacatattacaagagcaaaagataaagatgtcgatcatgcagtcaaagtggcgcaagaggcatttgaatcatggtcattaacttctaaatcagaacgtgcacaaatgttgcgtgatattggtgataaattaatggcacaaaaagataaaattgcaatgattgaaacattaaataatggtaaaccgattcgtgagacaacagcaattgatattccatttgctgcaagacatttccattatttcgcaagtgttattgaaacagaagaaggtacagtgaatgatatcgataaagacacaatgagtatcgtacgacatgagccgattggcgtcgtaggtgctgttgttgcttggaacttcccaatgctattagctgcatggaagattgcgccagccattgctgcaggtaatacaattgtgattcaaccttcgtcttcaacaccattaagtttattggaagttgctaaaattttccaagaggtattacctaaaggtgttgtcaatatactaacgggtaaaggttcagaatcaggtaatgcaattttcaatcatgatggtgtagataaattatcatttacgggctcaactgatgtaggttatcaagttgccgaagctgcagcaaaacatctagtacccgctacattagagcttggtggtaaaagcgccaatatcatattagatgatgctaatttagaccttgcagttgaaggtattcagttaggtattttattcaaccaaggtgaagtatgtagtgcaggttctcgattattagttcatgaaaaaatttatgatcaattggtgccacgtttacaagaggcattttcaaatattaaagttggaaatccacaagatgaagctacacaaatgggtagtcaaactggtaaggatcaattagataaaattcaatcatatattgatgcagcaaaagaatcagatgcacaaattttagcaggcggtcatcgcttaactgaaaatggattagataaagggttcttctttgagccgacattaattgctgtgccagacaatcatcacaaattagcacaagaagaaatatttggaccagtgttaacagtgattaaagtgaaggacgatcaagaagcaattgatatagctaatgattctgagtatggtttagcaggcggtgtattttctcaaaatatcacacgtgcattaaatattgctaaagctgtacgtacaggacgtatttggattaacacttacaaccaagtaccagaaggcgcaccatttggtggttataaaaaatcaggtatcggtcgagaaacttataaaggtgcgttaagtaactatcaacaagttaaaaatatttatattgatacaagcaatgctttaaaaggtttgtactagaataaatatcgtttctgaagcgtgtttgtaggtcagtctagcggtaagtcttaacatttaacggcgttgtttagattttaagcaaaacaaaatatataggaacacgtatcatgatattaggatataatgactaaaataatagcagtaggatggtttttaattgcaaatcatcttactgctgtttttaattatgctaatttgcgatgcggctattataaggacagagttgtttattaattatggtgatttagaaatatgaagttcaatatgcaaagtcatcgtttgttttaatatgcggaacaatcattaaagttattgcgattttttgaacttaatgaaactaaacaataaatttgagatacttttttgtcatttttatgtaactaacacaataatctcgtacattattaaaattttctatatgataggaataaagcaaagcgcgagtgtgctgtaaaagttttccaaggtgatattacataaagctataaagggtaaagattaatgagttgtcatgtaaatgacgatgatgtataaatcatggttaattacggaagcattaatattaacctgagaagctataaagaattatttttaaaagcgacaatattaaatacgacgcatttatttaggagtggcaaacgtatgaatgggaaaaaggcgaatacgataaacagatacaaatattttcatcatgtcaatcatcaaaaaattcaacaaagttctaaaaagacgctgtgggcatcactaatcatcacattgttatttacagtgattgaatttgtcggaggtttagtatctaattcattggcattactgtcagattcatttcatatgcttagtgatgtattagcacttggtttatctatgttggccatttattttgcaagtaaaaagccgactgcacgatacacatttggatatttaagatttgagatattagctgcatttttaaatggtttagcattaattgtaatttcaatctggattttatatgaagctattgtacgtattatttatccgcaaccaattgaaagtggcattatgtttatgattgctagtattggtttactcgtcaatattattttgactgttatccttgtaaggtctttaaaacaagaagacaatatcaatattcaaagtgcattatggcatttcatgggagacttattgaactctattggtgtcatcgttgcagttgtattgatttactttacaggatggcgcatcatcgacccaatcattagtattgtaatttcactcatcattttacgtggtggttataaaattacgcgtaatgcgtggttaattttaatggaaagtgtgcctcaacatttggatactgatcaaattatggcagatattaaaaacatagatggcatattagatgtacatgaatttcatttgtggagtattacaacagagcattattcattaagtgcccatgttgtgttagataaaaaatatgagggtgatgattatcaagcgattgatcaagtatcatcattgttgaaagaaaaatatggcattgcacattcaacgttgcaaattgaaaacttgcaattgaatccattagatgagccatacttcgacaaattaacataaataaaacattgtagcgcctaaaacattaatctatgtcataggcgcacgtttcgttttatacttatgttgcatcatttaaatgattttcgtcaatttctttgatgctatctacatctaacacgacatctttaggtttcaaaatatgaatatgtttttcatcatttgtatgtaaaatgcgttctatgatgtacctttgaccggccattgtttctacagcaatctttttgtttctagctaaacttgctacgacagattctttatccataatgatagccccctatatatatgtttatttacttataccctaacatgatttttatactctttgaaaatatattttacagaattttatctaaatatttaaaaaaatatcttaatatccttgtaatccgataagaattatagtaatattttttcaaccattgttataggaggtcttattaatgacattatttttattagaagctaacaatcttgattttgcatcaacgaaagaagaactagaagcaaaggcagcatcactatctacgaagacaattccaacattaattgaagtacaagctactgaaaatttaactcatggttattttattgtggaagcaaatgacgaagcagaagctaaacaatttttaacagaagcagatattagtattcaattagtcaaagaagtacgcttagttggtaaagatttagatgaagttaaaaatggtgatgcacatgttgattaccttgtaacttggaacattccggaaggcattacgatggatcaatatttagcacgtaaaaagaaaaattctgttcattatgaagaagtgccagaagttgaatttaaacgcacatatgtatgtgaagatatgtctaaatgtatttgtttatacaacgcacctgatgaagaagcggtacgtcgcgcgcgcaaagcagttgatacaccgattgatggcatcgaaaaactttaataagacaacaagttgatgagatatatgtatataggtttggcatggatttcgattgcagttaattagaatagctcaatgctataaatgtaagtagttgatatgaagaaactaatgaactaaatgcaagtattgtctaaaacaatcattttattgaaatttagtagagctgaaattaatataacgtcgttaattgaataacgcttatgttataagagcactcataccaaaccataatcatctatagatataacaattcacgatataagggctgtgtttggcatagccctttagatatacacttaattcctattaaaatagtagggattaaaagggggcttgtcatgattaaaattcaacaattacaacatcactttggatcacataaagtaattcataactttaatttggacattagcaagggagaaatagtcactttcatagggaaaagtggttgcggaaagtctactttactcaatattatcggtggatttattcatccatcgtctggtcgtgtcattattgataacgaaattaaacaacagccatctccagattgtttaatgctatttcaacatcataatttgctgccatggaaaacgattaatgacaacattaggattggattacaacagaaaattagtgatgaagagattaacgcacagcttaaattagttgatttagaagacaggggaaagcattttcccgagcaactgtccgggggtatgaaacaacgtgtggcactatgtcgagcgcatgtgcataagcctaacgttatattgatggatgagccattaggtgcattagatgcatttacacgttataaacttcaggatcaactagtgcaactaaaacataaaacgcaatcaactattattttagtgacgcatgacattgatgaagctatttatctttccgaccgcattgttctgttaggtgaagggtgcaatattatttctcaatatgaaattacagcatcacatccacgcagtcgtaatgatagccacctacttaagattcgtaatgaaattatggaaacatttgcattgaatcatcatcaagttgaacctgaatattatttataaggagtgagtgacgatgaaaaggttaagcataatcgtcatcattggaatctttataattacaggatgtgattggcaaaggacgtctaaagaacggtctaaaaatgcccaaaatcagcaagtgattaaaattggatatttgccgattacacattcagctaatttgatgatgactaaaaaattattatcacaatacaatcatccgaaatataaactagaattagttaaattcaataattggccagatttaatggacgcattaaacagtggtcgtattgatggtgcatcaactttaatagagctagcgatgaaatcaaaacagaagggctcaaatataaaggctgtggcattgggccatcatgaaggcaatgtcattatgggacaaaaaggtatgcacttaaatgaatttaataataatggcgatgattaccattttggtataccacatcgttattcaacacattatcttttacttgaggaattacgtaaacaattaaagattaaaccggggcattttagctatcatgaaatgtcgccagcagaaatgccagccgcattgagtgaacacagaattacagggtattctgtagccgaaccattcggtgcactgggtgaaaagttaggcaaaggtaagactttgaaacatggtgatgacgttatacctgatgcgtattgctgtgtgctagtactgagaggggaattgcttgatcaacacaaggatgtagcgcaagcatttgtacaagattataaaaagtctggctttaaaatgaatgatcgcaagcaaagtgtagacattatgacgcatcattttaaacaaagtcgtgacgttttaacacagtcagcggcatggacatcctatggtgatttaacaattaagccatccggctatcaagaaattacgacattggtaaaacaacatcatttgtttaatccacctgcatatgatgactttgttgaaccgtcattgtataaggaggcatcgcgttcatgacacgtcccacaaataacaaatttatattacctattatcacatttattattttcttaggcatttgggaaatggtcattattattgggcattaccaacctgtattgttaccgggtcctgctcttgtaggaaaaagtatatggtctttcattgttactggagaaattttccaacatttagcaattagtttatggagatttgtagcgggctttgttgtcgcattgttggttgctattccattgggcttcttgcttggaaggaatcgttggctatacaacgctatcgaaccgctatttcaattgattaggccgatatctccgatagcatgggcaccatttgttgttctatggtttggtattggtagtttgccagcgattgcgattatttttatcgctgcttttttcccaattgtgttcaatactattaaaggcgttagagacattgaacctcaatatttaaaaatagcagcaaatttaaatttaactgggtggtcattgtatcgcaatatattatttcccggggcatttaaacaaatcatggctgggatacatatggcggtaggaacaagttggatatttttagtttctggtgaaatgattggtgcacaatcgggattaggttttttaatcgttgatgcacgaaatatgttgaacttagaagatgttttagcagcaatattctttatcggattatttggttttattattgatcgattcattagttatattgagcagtttatacttagaagatttggtgaataaggagagatgatgatgactttagaaacgcttatcaaagaacaattagatcctcatttagtagaagttgatgaagggacgtattatccgagaacatttattcagcaattatttgtagatggttatttcggtgaggcggcattgagaaaaaatgctgaagtaatcgaagctgtatcgcagtcttgtttgacaacaggattttgtttatggtgccaattagctttttcaacgtatttagaaaatgccacgcagccacatttaaataatgacttacaacagcaattgttatctggagaaatattaggtgctaccggattgtctaatccgatgaagtcatttaatgatttagaaaagttgaaccttgaacacacttatgttgatggacaattggttgtcagtggacgtatgccagctgtaagtaatattcaagaagaccattattttggtgcgatttcgaaacatgaatcatcagatgaatttgtcatgttcattctacgtgccaatcaagatggtatcactcttgttgaaaaaaccaattttttaggagtcaacgggtcagcaacgtatcaaatcacattgaatcaagtcgtagtgccacaatcacaaattatcacgcatgatgcgaagcagtttgcggcaactattcgcccgcaatttattgcttaccaaattccaataggattaggctcaattaaaagttctttagagttaattgatgcattttcaaatgtgcaaaacggaataaatcaatatttagagtatgatgttgaagcttttaaaaaacgttatcgtcaacttagagaggaatattatgcaatattagatgacggtaacttaacttcacatttaaatgaattaatatcattgaagaaggacatcggctatttattgttagatgtaaatcaagcttctgttgtcaatggtggttctagagcgtacacaccatattcgccacaagttcgcaagttaaaagaaggattcttcttcgcagcattgacaccgacattaagacatttaggtaaacttgaagcagagttgaaggggtaagtgtgataagctgattttttgtttagatgcgtttgttgaaacattttttaaaataatataaatcttagtttataaacattttctgttaatttgttatatccttttaactaggaaaatatacatttcgtaataataataatcgttatcattgaaaaagtgttaataaggtgtataatgaaaatgtgaacaattaatgaacttcttattttaaagaaggtgaatactatagatacgcatactaaagaacaacaattctcgaatctagtaagatcttatcgtaaagaatacgtgggtaaaggacccaatagtattcgagtgtcgtttaaagataattgggcgattgcacatatgacaggtgttttgagtaaagttgagagtttttacctaaacgacaaacgcaatgaatcgatgctccattatacacgcacagagaagattaaacagatgtataaagaaatagatgtaaatgagatggaaagtcttgtaggcgctaagtttgtaaaattatttacagatattgatttgaatgatgatgaagtcatttcaatatttgttttcgataagtcaatagaataagtgttgctggtgtaaggtacacggtgctgtttgctaacttcgctttgaatttaacaataattcaagggggtggtatgtcaaacggtgccgtttttttgtcatatttttaaaacaagcaacatgcaacacgtactttaaggaagtcaaaatttatcatttaggagagatggatatgaaaatcgtagcattatttccagaagcagtagaaggtcaagaaaatcaattacttaatactaaaaaagcattaggattaaaaacatttttagaggaaagaggacatgagttcattatattagcagataatggtgaagacttagataaacatttaccagatatggatgtgattattagtgcgccattttatcctgcatatatgactcgtgaacgtattgaaaaagcaccgaacttgaaattagcaattacagcaggtgtaggatctgaccatgtagatttagcggcagcaagtgaacacaatattggtgtcgttgaagttacaggaagtaatacagttagtgtggcagaacatgcggttatggatttattaatacttcttagaaactatgaagaaggtcatcgtcaatcagtagaaggtgaatggaacttgtctcaagtaggtaatcatgcgcatgaattacaacacaaaacaattggtatttttggatttggtcgaattggacaacttgttgctgaaagattagcgccatttaatgtaacattacaacactatgatccaatcaatcaacaagaccataaattgtctaaatttgtaagctttgatgaacttgtttcaacaagtgatgcgattacaattcatgcaccattaacaccagaaactgataacttatttgataaagatgttttaagtcgtatgaaaaaacacagttatttagtgaatactgcacgtggtaaaattgtaaatcgcgatgcgttagttgaagcgttagcatccgagcatttacaaggatatgctggtgatgtttggtatccacaacctgcacctgctgatcatccatggagaacaatgcctagaaatgctatgacggttcactattcaggtatgactttagaagcacaaaaacgtattgaagatggagttaaagatattttagagcgtttcttcaatcatgaacctttccaagataaagatattattgttgcaagtggtcgtattgctagtaaaagttatacagctaaatagaataaggatgctgggctagcgattaacgctttcaattttatataaatgaatcatataagcactactgctgttgtaaagatggcagtagtttttttatgattacatctaagtatagtcacggctatgttaggacaatgatttaacatttacgcacatatgtgttcacttacgcaattattgataaatttcattcatttggaataatatatagtcatatagtgctaatttttttgaggcattatatgcaagatgcattgtaaagtcgatgcatttgtttgttaaataactttgtataactaaaaattctttgtttcaacgtataatctaataatagattttatataaatggtagtgtgtatatatgtggaaaggggtgtagttattaatgaaacgcttaagtacgactttgaaagtacgattgattagcaattttttacagctaattattacgacagcatttataccgtttatagcactatatttaacagatatgttaagtcaatcaattgtcggtatatatcttgttggtttagtggttctaaaatttccattgtccattatatctggttaccttattgagatatttccgaaaaagttgctagtacttatttatcaagcgacgatggtgataatgcttgtgttcatgggcgtatttgggtcacatcaattgtggcaaattattggtttttgtgttgcatatgccatatttacaatcgtttggggattacaatttccagttatggacacattaattatggatgcaattaccgaagacgtggaacattatatttacaagattagctattggatgacaaacttatcggtagctattggggcattgttaggtggcttgatgtatggctacagtatgttactacttttcttaatagcagcttgtatatttttaattgtactctttattttatatatttggttacctcaagaccgaaatcaagtaaagcaaagtgatgacaagaggcatgcaagtcgttatcaaaaattacaaataatgaatatatttcgcagttataaattagttttgaaagaccgtaattatatgttattgatttcggggttcagtatcatcatgatgggtgaattttcaatctcctcatatattgctattagactaaaggatcagtttgaaacaataagtataggttcatatgatattacaggtgctaagatgttagcaatcttgctaatgattaatacggtcgtcgtcattttactcacgtattcaatctcgaaagttgtattgaaaatagattttaaaaaagctttaatcactggtttgctgatttatattgttggctatagtggtctaacctatcttaatcagtttggcttattagttgtttttatgataattgcgactgtaggtgaaattatttattcgcctatagtttcagaacaacgctttaaaattattcctaaagctaaaagaggaacatatagtgcagttaatgcattaggtattcatttttcagaaacactagctaggttagggattgtgttgggtgttttcttaacgtcattacaaatgggactgtatatgtttatcgttttaacaattggtgctagcatgcttgttgctggtgtatttgggggacaaaaacaagtgaatacaaattgaatttatttaaatatttattttatgcatctttttatatggaaaacctattaatttggtcgtaattaaaatagagataaatttattaagaatttgttaaaatttaaggataacaattgttttatgcgagttgtttgtttaatataaacttgcttcatggatattttgtaacaacaatattgagtttgcaatgagatgtgaacaacagaaagtgattaacgatttgtagtgtgctatttatcgaagatgtatgtaatttacattgaaaaatataccaattgtaacgatgatacaagatgtattttagggtagaatatatcgctcatatgttgcgaatggtgttttatattaatcattacataacgagttaattaacatttcgtcggttatcatatcatcatgcaatttcagtaagtaatgagtattatgatatgaaagaaggactttttatgattatgggtaatttgagatttcaacaggaatattttcgtatatacaaaaataatacagaatcaacgacacaccgtaatgcgtattgggttaaactcgctaaaaatgttgaagctactaaaatgatgtatgcattatcgacaattgtgcaacaacatgcatctataagacatttttttgatgttactaccgatgacaatttaacaatgatacttcatgaatttctgccttttattgagataaaacaagttccatcttcttccgcaaactatgatttagaagctttttttaagcaagaattaagtacttaccattttaatgattcacctttattcaaagttaaattgtttcagttcgctgatgctgcatatatactattagattttcatgtgtccattttcgatgatagtcaaattgatatttttcttgatgatttatgcaatgcatatcgtggcaatactgttattaacaatactcgacagcatgcacatataaatagaaatgatgataaagacaatcaagatgcatcgcatatagcattagactcaaactattttcggttagagaataactctgacatccatattgatagttattttccaattaagcatccatttgaacaagctttatatcaaacgtatttgattgatgatatgacatcaatagatatggcatcgttggctgttagtgtgtatttagctaatcatataatgagtcaacaacatgatgtcacattaggtatacatgtaccatcacatttaccaaatgatttacacggaaatattgtgccgttaacgttaacaatcgatgcaaaagatgtatgtcaacgttttacaacagattttaataaatgtgtgttgcaaaatatgtcgcaattacagtgcgcgaagtcttcgctttcactagagactatttttcattgttatcatcatatgatgtcttgttgtaatgatgttattgaggatgtacatcaaatacatgatgcacatacatctttagcggatattgaaatttttccacatcaacacgggttcaaaattatatataacagtgcagcatatgatttgctctcaatcgagacgctgagtgacttagttcgaaatatttatttgcaaattactgaagaaaatggaaataaacgaacaactgtagatgaacttaatttgatgacagaacgtgatattcaattatatgacgatatcaatttaagtttgcctgagatagatgatgcgcaaacagttgttaccttatttgagcaacaagttgaagcaacgccgaatcatgtcgctgtgcaatttgacggagtgtttataacatatcaaacattgaatgcacgcgcgaatgatttagcacaccgtttgagaaaccagtatggtgttgaacctaatgatcgtgtcgctgtcatagctgaaaaaagtattgagatgataatagcgatgataggtgtgttgaaagctggtggggcttacgtgccaattgatccgaactatccaagtgatcgtcaggagtacattttaaaagatgtaacgcctaaagttgtaataacgtaccaagctttatatgaaaatggtaaacaaaatattaatcacattgatttgaataagatagcgtggaaaaatattgataatctttctaaatgtaacacgttagaagatcatgcttatgttatttacacgtcggggacaactggtaaccctaaagggacactaattccgcaccgaggtattgttcgcttggtccatcaaaatcattatgtaccattaaatgaagagacgacgattttgttatcaggaactatagcctttgatgctgcaacatttgaaatatatggtgcattgctcaatggtggaaagctgattgttgctaaaaaagaacaattattaaatccaatagcggtagaacaattaatcaatgaaaatgacgttaatactatgtggttaacctcctcattatttaatcagattgctagtgaacgaatagaagtattggtaccgttaaagtatttattaattggtggagaagtattgaatgctaagtgggtggatttgcttaatcaaaaaccgaagcatcctcaaattattaatggttatggaccaactgaaaatacaacatttacaacgacgtataatatacctaacaaagttccaaatcgtattcctattggtaaaccgattctgggtactcatgtttatatcatgcaaggcgagcgtcggtgtggcgttggtattcctggagaattatgtacaagtggctttgggttagctgcaggttatttaaatcagccagaattgacagcagataaatttatcaaagattcaaatataaatcagctgatgtatagaagtggtgatatcgttcgtttgttacccgatggcaacatagattatttatatcgaaaggacaaacaagttaagattcgagggtttaggattgagttgtcagaggttgagcatgcgctcgagcgtatacaaggtattaataaagcagttgttattgttcaaaatcatgatcaagatcagtatatcgttgcttattatgaagcgatgcatacattatcacataataagattaaatcacaattacgtatgaccttaccggagtacatgataccagttaatttcatgcatattgagcaaattcctattactattaatgggaaattagataagaaggcattgcctatcatggactatgtcgatacggatgcctatgtagcaccgagtacagataccgaacacttgctatgccaaatttttgcagatattttacatgtgaatcaagtaggtattcatgataatttctttgaattaggtggccattcattaaaagcaacgttagtggtgaatcggatagaggcatctactgggaaacgattacaaattggtgatttattacaaaagccaactgtatttgaactagcacaagcgattgctaaggttcaagaacaaaactatgaagtgattccagaaactatagttaaagatgattatgtgctgagctctgcacaaaagcgtatgtatttattatggaaatcaaaccataaagatacggtgtataacgtaccttttttatggcggttatcatcagaacttaatgtagctcaattgcgacaagcagtgcagcgtttgatagcgcgacatgagattttacgaacacaatatattgttgtagatgatgaggttcgacaacgtattgtggcagatgttgcagttgactttgaagaagttaacacgcattttacggatgaacaagaaatcatgcgccaatttgtagcaccttttaatttggaaaagccaagtcaaattagagtgagatacattagaagtcccttacatgcatacctctttatagatacgcatcatatcattaatgacggtatgagtaatatacaattaatgaatgatcttaacgcactttatcaacataaattattgttaccacttaaattgcaatataaagactatagtgagtggatgtcgcatcgtgatatgacgaaacatagacaatattggttatctcaattcaaagatgaagtacctattttaagcttaccgacagactatgttagaccaaatattaaaacgacaaatggagcaatgatgtcatttacaatgaatcaacaaatgagacagctacttcaaaagtatgtagaaaagcatcaaattactgattttatgttctttatgagtgtggtcatgacgttgttaagtagatatgctcgaaaagatgatgttgttgtcggtagtgtgatgagtgcgcgtatgcataaaggcacggagcaaatgctaggcatgtttgctaatacgttggtatatagagggcaaccgtcacctgataaaatgtggacacagtttttacaagaggttaaggaaatgagtttggaggcatacgagcatcaagaatacccattcgaatgtttagtaaatgacttagatcaatcacatgatgcctcacggaatccattatttgatgtcatgttagtactacaaaacaatgaaacgaatcatgctcattttgggcatagtaaattaacacacattcaacccaaatcagtgacggcgaaatttgatttatctttcatcattgaagaagatcgcgatgactatacaatcaatatcgagtataataccgatttatatcactcagaaacagttcgtcacatgggtaatcaatgtatgattatgattgattatattttgaagcatcaagatacactacaaatttgtgatataccaaacggcacggaggaacttctaaattgggtcaatacgcatgttaacgatcgaatgcttaatgtcccgggaaataaatctatcataagttactttaatgaagttgtctcacgacaaggtaatcatgttgcgctagtcatgaatgatttgacaatgacgtatgaaacattacgcaactatgtggatgccattgcgcacatgctcctatcaaatggtgtgggcaatggtcaacgggttgccttgtttacagaacgtagttttgaaatgattgcggcgatgttggcgacagttaaagtaggtgcatcttatatacctatcgatattgattttccgaataaacgacaaggtgcaattttggaggatgctaaagtaactgcagtcatgtcttacggcgttgaaattgaaacgacattaccagtcattcaattggaaaatgctaaaggctttgttgaatcaaaggaaaatgaacaatatgatgatttacatggcaatcaacttgaaaacacagcgatgttagataatgagatgtatgctatttacacatctggtacgaccgggatgcctaaaggggttgccatacgacaacgaaatttgttgaatttagtgcatgcatggtcaactgaattgcaattaggcgacaatgaagtatttttgcaacatgcaaatattgtttttgatgcatcagttatggagatttattgttgtttgttaaatggtcatacgcttgtgattccagatagagaggaacgtgttaatccagaacagttacaacaactcattaataagcatcgtgtgacggttgcgtcgattccgttacagatgtgtagtgttatggaagacttttatattgaaaagttgattacaggcggggcaactagtacggcatcctttgttaaatatattgagaagcattgtggcacgtatttcaatgcctatggaccatctgagtcaacagtcatcacatcgtattggtcacatcattgtggtgatttgatacctgagacgattccaattggcaaacccttatctaacatccaagtgtatattatgtcagatggtttgttatgcggtattggtatgccaggcgagttgtgtattgcaggtgatagtttagcgataggatatattaatcgtccagaattaatggctgataaatggcaaaataatccatttggtaaaggaaagttgtatcatagtggtgatttagcacgttatacatctgatggtcaaattgaatttttaggaagaatagataaacaagtgaaagttaacgggtaccgtattgaacttgatgaaattgaaaatgcaatattagctattcgtggtatatctgattgtgttgtaacagtaagtcactttgatacgcatgatatattgaatgcttattatgtcggagagcaacaagtggaacaggatttgaagcaatatttaaatgatcagctgcctaagtatatgattcctaagactataacgcatatcgattgtatgccattaaccacgaatgacaaggtggatactacgcgtttgccaaatccatcacctatacaacagtctaataaagtgtatagcgaaccctctaatgaaattgagcagacatttgttgatgtatttggagaggtattgaaacaaaatgatgtcggtgttgacgatgatttctttgaacttggtggtaactcattagaggcgatgttagttgtctcgcatttaaaacgatttggccatcatatttcaatgcagacattataccaatataaaaccgtgcgacagattgttaattatatgtaccaaaatcaacaatcattagttgcattaccggataatctttcggaattacaaaagattgttatgtctcgttataacttgggtattttagaggatagtctaagtcatcgacctctaggaaatacactattgactggcgcgacaggttttttaggtgcttatctgattgaagtactacaaggatacagtcatcgcatttattgtttcatacgtgctgataatgaggaaatagcatggtataagttgatgacgaatttaaatgattatttttcagaagagacggttgaaataatgttatcaaacattgaagtcattgttggtgatttcgagtgtatggatgatgttgttttaccagaaaacatggatacgattattcatgcaggtgctcgtacagatcactttggtgatgatgatgaatttgaaaaagtaaatgttcaaggtactgttgatgtcatacgtttggcacaacaacatcatgcaaggttaatatatgtgtctacgataagtgtgggaacttattttgatatagacacagaagatgtgacattttcagaagcggatgtctataaagggcaactactaacatcaccatatacacggagcaaattttatagtgaattaaaagtattagaagctgtaaataatggcttagatggtcggattgtacgtgttggtaatttgacgaatccttacaatggaagatggcatatgagaaatataaagactaaccgtttttcaatggtaatgaatgatttgttacaactggattgtatcggggttagcatggctgaaatgcctgtagatttttcttttgtggatacgactgcaagacaaattgtcgcattagcacaggtcaacacaccacaaatcatttaccatgtgctatcacctaataaaatgccggtgaaatctttgttagaatgcgttaagcgcaaagaaattgaactcgtcagcgatgaatcatttaatgaaattttacagaaacaagacatgtacgaaacgattggattaactagtgttgaccgtgaacaacaactagcaatgatagatacaacattaacattaaaaataatgaatcacatcagtgaaaaatggccaacgataactaacaattggctgtatcattgggcacaatatatcaaaacaatattcaataagtaagtagggaaagttatgacagtatttgtaatgcaattacagagtaacttgaaaagtattgaagaattaatatcacaaagtcgttggtcatataaaaaaccgcgtacagtcaactatagatacaatcaagataaactcatgcacagattgggagatattttagtgcaatatggaattcaacatgacacaggtttattaccacatgaatggcattatcacatttcgccacgaggtaaggcagatattgttcaacacaatcgtgatggacagcccatctatgtgagcttatcatatagttatccttatatcgtgtgtgttgtcgataaagaaccagttggtattgatatcgaaaagatatcacaacgtttagactggcgtacgttagtgacgtgtttctctacaaacgaagcacatcaaatatgtagtttaaatgatttttatcaaatatggacacaaaaagaaagttttacaaaattgattggtgaaggtttaatcaaaggattggacatttatgatatgacacaatcacacttttatcaatcacgtgaagtgaagttcaaacaatttatttttgatcagtttatggtacaggtatgtttcttaggacaggcaccctggggttataaaaaagtgtctgtatttcagttattgagtagttaatatgacgtctgacagtatcattgcgcagtgattttaaactatactgcctaaatgtttactgttagatgtttttttattggaaaaatgaaaggtgaatacacgatggcatcattcaaaatcatgacgagattaaagtaagtgataaggtaaaaatatactgagcaatattgaaattaccgaaaataatagtttgttacgacgcatttgagactttaatgctcacgtaagttggctggaatcatatcatgtcagttaataaaataacgtgagcatcaatcatcatactcaaacgatgatttaaaactcacgttaatgttagtcagtgtattaatttaatttatagcgatagacaaaatgttgtcgcactaattcaattgtcatcatccagacgatatggccaaagaattctgacagatgctcttggaatggttgatcccacacagcaggtacagtatgcatgattggcataatgataaggtggaataatacccaaatagcaataccaaaaacagcaccttgtcccattgctaagtaagcgtattttttaactaatatgcagtaaataattgcaatgacgatagaaaaactaaagtggacaataaagcttacccaaggcaattccatatttgaaaatgtatatgtttgatgcgtaaactcactactaaatcctaattgttgcaataactcttgaggtgggttcgttgcattacgttctggtgtgcgaggtggaaacatgacctcccaacctaattttacaattccagataacaagccaccgataattccagcataaatgaatatacccatttgtcgtttcgtcaacttaaggactcctctctatttactatcctcattatagtattttgtgaaaataatcacaataaaaagctttgcaaaacttaaaatattttgataaacaaatttgtaaaaggttattagttttttacatctcatattgtatcgtactgtattcaaaattgttaacgagatgaacggtaaataaatgttttagcgcaatggataatcgaactggaatcatctcgcgtgtcaaaacttgttaggccttaatttcatagttatgaattaaggattgttgtgccaacaaaatcattattgtaaatagattcaatgatatttggcttgtttcctgatgcaatgataactttaggacagccattttcaatcgcatttttggcatctagcactttgggaatcatacctccataaatatcaccatgttcaatatattgatgaatatcgactaatggcaattgaggtataacaacatcattgatgagtacacctgcaatattacttaatacataaataggcgcttttaatgatgatgcaataaaataggcaagcgtgtcagcattaatattgtaaaattctccatcatggttattgaaaccaatcgaattgatgataggtacaaatttagtacataaatactgtaaagcatccttatttaaagcggtcggaacaccgacatatccatattgttgatcaaaagatgtaatttcaaacagctgtgcatccaaaccacataagcctattgcagaacattggtgctggttaaattgagctactaatgcagtgttaacgtctgcaatgagcgtgtgtttagtaatggtcatggttgctttatcagtcactcttaggccattaacaaagtgtggctcgatttgctggtttgataatgcttcattaataaatgggccaccgccatgaacgataatggggtagatgttgtttgatcgtaaatgcttaatgttgttaataattgatggatgcatgtcactaagtgtactgccaccaattttaatgacaataaatttcatctaaccaacaccaccttatgttcgatatgatgcgttgatacgcacataatcataggataaatcacaaccgtatgcagtcgctgcagcgttacctaaaccaagctgaacgtcaattgtgacattttcatgagttaatgtattcgacatagcttgctcatcaaatagtacagccatacctttatcaacgacaggtatttggttcagttgaacatatgtgcagttaggatcaatttcacatccgctgtagccaatagctgtaatgattcgaccaaaattggcatcttcgccaaaaatagctgattttactagatttgaacttacgatagttttaccgatttttcttgcatctgatattgatttagcgcctgacacattgacgctgattaactttgttgcgccttcgccatctctggctatagctttagctaaaaatgtacagacaaaattgaatgcatcaacaaatgtttcccattgtggatggtcttgactaagtatttggtgttcaacttggtgatttgccatgactaataccatgtcatttgtacttgtatcgccatcaacagtaatcatattaaatgtatggtcagtcgaagattttaataattgatgaagtgtattcgattcaatcgatgcatcggttgttataaaagcaagcatggtagccatatttgggtgaatcatacctgaacctttggtgctaccaccaattgtaacggttttaccatcgatttttagtgatacagcgatatgttttgtacaggtatcagttgttaaaattgcctcgttaaacgcacctggcgttgcaaaattagcatccttaatatgttcggtcccagtcttaattttatccataggcaaatattcaccaatgaccccagttgaagcaacagcaacatgctcagatggtatttgaagttgttgagcaacccatgtttgtgtttgtcgtgcatcatctatgccttgttgaccggtacaagaatttgcattagctgaattaacaacaagtgcttgtaattttcctttagacttttgtaaagtgtcttcagtgacaataagtggtgcagctttaaactgatttaaagtatatacggcagctgcacttgccaaagacgatgagtaaatccacccaaagtcttttttgttagcgcgtaaaccgatgtgcataccaccagccgtgaagccttgaggtgtactgatatcgccatgtttaataattgaaaagttatattgttgtgatgtcgtttcttgatgtttcattctaacaccccttatggataaactggtgattgatttaggccagtcgtcacttcaaaatcatataatatatttaaattttgaatggcttgcccacttgcgcctttgacaaggttatcaatcactgatactaaaattgctgtttgcgttgtttcatctacatagatgccgatatcgcagtagttactaccgagtacttcttttgtggttggaaaagtcccaatatctctaattctgacaaatggctgattagcataataagaggtcattaatttatgtaatgattcagtcgtatattcagatgataatttgacatatattgttgataaaatacctcgtgtcattggtacgagatgtggtgtaaatatgactgatacatcttgacccgcaatgatagataaatattgctcgatttccggtttgtgtttatggtttccgattgcataagcgcttagattttcattcatttctgaaaaatgaacacgttgtgataatgaacgaccagcacctgacacgccggtcttagcatcaataataatagatgacaaatctactattttttcgctaataagtggatgtaatgctaataatgttgctgtagggaaacagccaggattagaaatgagcttcgttccattgttatcaaacgattgccattctgaaatgctgtaaatagcatgattcaaatcatcttgtgctgcagcagtttctttgtaatatgcttcatatatttcacgattcttaattctaaatgcgccagataaatcgataacatgaatacctttttctactaagggagggatacatgttttacttacgggtgctggtgtcgcaaagaaaattacatcacagtcattattatccactgtaagtgcttcgaaatgttgcataatatgttgtaaatgtggaaatgttaatttcaacggttcatctacttttgaatgtgagtagatgtgtgcaatcgttacatgaggatgtgtttgtaacaatcgaattaattcaattgcgccataaccgctaccgccaacgatacctactttaatcatcatgaatccctcctatgtcatatataaatgattaattgttaatttttaaaaacgtcttgaaaagctgcaacaatttgatggatttcctctttatcaatgactagaggtggagacaatcgaatgatagtacgatgcgtgtctttgcataagattccacgttgaatcagttgatccacaaaaggtgcagcatctgtgttaagctctatgcctataaataaaccacgacctctaatttctttaatactaggatgtttaagttgtagcaacgcttttaataaaaatgaacctaagcgttctgatcgttcaaccagttgttcatctttaagtacatcaagcgctgccgtcgatattgcaatggctaaagggttaccaccaaatgttgaaccatgtgtacctggtgttagaacacgcatgacatcattatttgcaagtacagcagatacagggtataagccgccacccaatgccttacctaaaatataaatgtctggaacgacttgctcccattccatagcaaaccatttcccagttctaccaagaccaacttgaatttcatctgcaatcaataatatttgatgtttatcacatagttgacgcacagcttgaatatatcctttcggtggtatattaacgccaccttcaccttgaattggttccaaaataattgctgctgtattcggtgaaatagcttgtgttaattgttcaatgtctccaaaatctactgttgtagtgccttgaagtagggggtgaaatcctgctttatatgcgtcgtggttagatagtgataatgagccaagtgtacgaccgtgaaaattgttattcatagcgatgatttcaacttgtccgtcagtaatgcctttaacttcagagccccattttctagcaattttaatggctgcttcaacagcttcagtaccagagttaagggggagtactttgtctttcttagcaagatgacaaattttttcttcccatttcccgagattgtcactataaaggacacgtgaaatgatagacaactttgaagcttgttctgtcatcgctttaacaattgttggatgacaatggccttggtttgcaactgaaaaacccgaaatgcaatctatatattgtttgccatcagtatcccaaactttgacacctttacctttagaaatgacaagcttaagtggtgcataattattagagctataataatcagttaattcaatgattgaattcatcggtctccctcctttatatttatacattttaaagaattaatattaatatattacagttgttcaatataagtgtcaaatataaatttaataatataaagataaggttgtgtttgtattaatgtgatttgtaaaatgaaagtactaatattttttgtggataatcattgatatgtatgtatacgattgcagtttaatgtagtatgaataaaaaatgccacaagcatatgtttaacatatgactgtggcatagtattatgcttgtggaattttacgatgcttaattttataaataatgaagccgataatgaaaccaatcaaactgagaacaacccagcccataccaatgtctgataatggtaaatatttttggctgaaattaatcaaagtttgtgagaatgatgtgcttgaaatgaactctggactagcttttaatccatctactaatgcagcaatcattgtaaagaaaatggtacattgataaataagttttgaatgatggaatttgctactaaataatgttagtacaatcaaggcaattgctaatggatataagaacattaacactgggactgagtacataataatcttagttaaaccaacattcgcgaataagaacgaaataaagcttacaactgttgcaatcgctaggtaattcattttagggaaaaggtgttcgaatgtttctgaaaatgccgtaatcaaaccgatggctgtttttaaacaagcaaccataacgataagtgacaacaggacgataccgtagttacctaagtagtattgagtaatttgcgctaaggcaataccaccattttcactaagtttgaaatgaccaatacttaatgtacccatgattgctagtagggtataaatgatccccatcataatgatactgatagtaccagacttaattgtttctttagcgatatcagttggattttcgatacctaactttttaatcgttgcaacaatgataataccaaatgccaatgacgctagcgcatctaaggtattgtatccatctaaaaagccgttaaataaggcatgtgattgatattgtttactaataggtgcatcagatatgccacctaatggatggataaaagcaaataataaaataattgctaataatactaagaataccggatttaaaaatttaccgatatattctaaaattcttgatggctttctcgcaaaaaaccatgcaatcacaaagaagacgaagctaaaaataaataaatataaagtgatttgctttggtgataaaaatggcgaaaatgcaatttcaaatgatgtcgttgccagtctaggtaaggcgaaaaatggtccgataactagatataaggcaatcgtgaaaatgtaagcatatgttttattaacacgcgatgcaatttcaaataaaccagatgtctttgaaatgccaatagcaatgatacctagaaatggtaagccaattgctgtaattaaaaatcctaagttagcgataaaaacgttagaaccagcagcttgacccaagtgtattgggaagataagattgccggcaccaaagaataaaccaaataacatagaacctataaacatgttttctttaaatgttagtttcttcttcatatatgtatttgttctcctttttagaacttataaaaatctacttaattaagataatatcaaaaattaaacataaagtgatacataattttgcaataaatactaaattttttgaaaattccggaataaatactgttttttatgtagtaggggcgtaagttaagaacgatttaacagatatagaatatgttaaatatagaaggttagacaacccgacgtattaatactttgtgaaataaagatccccctcaacatgatcgaaggggggaagtatatgtttagttcaatatatttagaaagtcgtttgtagttattgtttgtcccatcaatgggaatacattatctattggaaattgatgtagcgtttcgttttgtgcactcatcatatctgtaacaaaaaactgattgtagtttaattgataggcatctcgcgctgtcgtatctacgccaatatgcgttgcgacaccaccaagaacaatcgtatcaattcctcgacgtcgcaattgtaagtccaaatctgttcctacaaatgcactaaaatgtcgtttgtctatgacaaaatcgtcatctctcttgtctaataaatgatggaaacgactgtagtcgtcgccttcttttggtggtaatgagatcattacatttggttgcaatacatctttaccatcatagaaattcacgcgaacaaaagcgataaagccattgttttttctaaaaacatctattaatttattagcgttttgaacgacattttcagctgtatatggggcataatccattttaagaataccttcttgcaggtcgattaacactaaagcggttttattaaaattaatcatcttatatcagagtcctattcgtttaataaagtattcgcttaaacttataccctgtatacgatgaaattatttattttgttgtgaaaaagctttagcgatatcgatgagtttcttcggtgcgtcttcgacagccattttgacttcgacaaaatgcatcacatcgggatgaccattaattgcattaaacgtgtcttgtaaatcttttgatgattcaacgtcatgaatttcaacatttttaccaccaaatacagctggtaaagctttataatcccacatgtgaatttcattataaggttcatacatgccgtgaataagtcgttctaccgtatagccgtcattattaatcacaaataataccggtttaatatgctgtctaatcatagttgaaatagcttgaacagttagttgcaatgagccatcaccaattaataataagttacgacgatctttgtctgctaattgtgaacctaatgttgcaggtaatgtatagccgatagaaccccataacggttgccctataaaagtattgtttttgtataatgctaaatcataagcaccaaagaatgatgtaccttgatcagcaatgatgacatcatttggttttaagaaattttgcatcattttaaaataagtttgttgtgttaatggttctgtgccaacagtataatcgggtgatgttggacgatgatacgcagggaacgttgcgttattcgtatatgaaatattggataactgttttaacaatgatggtagagatatttcatcatttgtaacatcgtcaattttgatattgtgatgatttaacataacgacatcatcgatattgaattggtatgaaaaacctgctgttgctgaatctgttaatttggctccaatatttaaaattaaatcgctgttgtccacataatctcgtattttatcttcggcaattttcccatcgtaaatacccatataatatggattttcctcattaaaagcaccttttcctaatgaaagttgtgctactggtatctgtgtttgatttacaaaatcttctaattcttgatggaggtgaaaactgttaatttcatgtccagtaatgatgataggctgcttcgcttgatgcagtttagttgctaataactctatatatgttgatgcatccgtatatttagttgccgtcacttcaaatggtgtcggtatctcaatttcagagattgcgacatcgattggtaaatgtaaatgaactgggcgtctttcggcgattgctgtattaattaaacgtggtatttcggttgttgcattttcaggtgtgatataaccttgtgcaacggttatatgtgcaaacatttttcgatagtcgtcaaatgtaccttcaccaagtgagtgatgtacatatttaccgccttgttcaacagcacgtgtcggcgcacctgtaatcgcaatgacaggtatgcgttcagcatatgaacctgcgataccgttgacggcacttaattcgccaacaccaaatgtagtaactaatgcagcgagtccattaagacgggcataaccgtccgctgcgtaacttgcgtttaattcatttgtatttcctacccaatctacattgggattgctgataatatcgtctagaaaagcgagattaaaatcaccaggaacaccaaaaattttatcgacgcctgctcgatgaatagcgtcaattaagtaagctccaatgcgttgtttcataaaaaaagccaccttttctctatatttacacttaaaatgatagcctcgaatatagtgtaaggtcaaggaagttgactttgttgtgaaaacgctaacaatagtgaacaattaatattttttaggaaatgagtatgaaggggggctttaattgatgatcttaaaattcaaaatttaaggggagagcgaactatcaatgatgctgcaaaatacaatagcaaagaaaaaacaggcgcgtcaccttatgaaggtatacgcacctgtttatagtaagcattatttagcttcaaataattgatcgccaaatgaaatgttgccatgttcaccttgtttaaaatcaaggtttgtaatgtttccttgtgtcacgataataggcgtaatatcactctttgcatgattgcggatgtagtctaaatcaaagttgattaataaatcaccttgtttaacttcttgaccttcctcaacatgtaaagtaaagccttctccgtttaatttaacagtgtctaaaccgatgtggattaatagttctaaaccactatctgatacaagaccaattgcatgttttgttgggaaaatcatttgtactttaccgttgaatggtgcacgaacttcaccttgtgaaggtttgatagcgataccgtcacccatcattttttcgctgaacacttgatcaggcacttctgataatggtgttacttcaccagttaatggtgcatgcacgatatggctcaattcgcttgttgcagatttatcttctgcaacaacaacagtttcgtctttatcgtcttccatagtagtaggattttctactacttgaccattcataatctgttgcatttcatgtttgatttggtcagatttaggaccaaaaattgcttgcatattattgccgacttctaatacaccagatgcgcctaaatctttcaaaccaggaacatcaactttagatttgtcgttaacttcaacacgtagacgtgtgatacaagcgtctaaatgtttaatgtttgctttgccacccatagcttctaatactgcatatggtaattcagttgctgaagcagtagccgcttgtgattgtttatcttcacgacctggtgttttgtattttaattttacaattaagaatcggaatacgaagtagtaaataactgcgtatacaagacctacaggaatgactaaccaccattgtgtcttattaggtagtataccgagtaagaagtagtcgatgaaaccacctgagaatgtataacctagatgaagatctaataagtacaatgttaagaatgataaaccatcaagtactgcgtgaataaagaataataatggtgctacaaataagaatgagaattctaatggttctgtaataccagttaagaatgatgttaaagcagcagaacccattaaacctgctactactttcttattttcaggtttagctgtgtgataaattgctaaagctgctgcaggtaaaccgaacatcataacagggaattcaccttgcatgaatttaccagctgtcaaatgtgcgccttcacgaatttgttcgataaagatacgttggtcaccgtgaataatttcaccagctgcatttttccatgaaccaaactcgaaccagaacggtgcgtggaaaatgtgatgtagaccgaatggaattaataaacgcttgatgaaaccaaataagaatacggcaacaccagtatttgaatctaataatcctgtactgaatgcatttaatcctgattgaatcgttggccaaattaatgccattgggaatgctaaaataaatgatgttgtagccatcataataggtacgaaacgcttaccagcgaagaaacctaaataagatggtaagttaatgttatagaacttgttataacaccaagctgccagggccccgattataataccgccgaacacacctgtttgtaatgttgggatacctaaaatgctagcgtaaccactcgctggatcaccaatattcttaggtgtaacttgtaaaaagtcgcccattgttttgttcatgattatgtaaccgacgaatgctgcgatagctgctacgccatcaccgccagctaatccgattgcgacacctaatgcgaaaatcataggcaagttatcaaaaatgataccaccagcacctgtcattaatttagcgacagtttgtacgccaccattttgtataaacggcaagtagtgttgtaatgattcaccttgcatagctgtaccgatagctaataacagaccagctgctggtaaaatcgcaacaggtaacattagcgctttaccaatacgttgcaattgaccgaaaagtttcttcctcacttgtccaacctccaaagttgtatttattatttaagattcaataaaaaaagacacgagcaaatagactgtgttggtaaccatcacagcttaatttaactcatgcctaatcttacttagtaacacgttggtgtatgtaattaatgtaaaagaagcaattgactaagtagtatataaaactgatacgttagtttatctagcttaccatcacatcttattgaatcttatttgtttgcgactcctattttagcatggtgaagtatgcgttttcaatacaattattaaattcaatttcaaatctcttaattgttcacagattattattaaaacataatataagataatcctgaataaaatgtataaaagttattgtaataatccagcagtagcagctattatcagcacttaaaagaaaggataatctttgatggtgtaataattaacttgtgacagaaatatgtaagattattacaatgaacaggctttaactgattaatattgtaatgtgttttctcttatagtaaaatgtaagcgattacacaaatcaactatattttcctaataattatattgttaaggagggctactttgacaggcttttcagtgtatttaggacaacctttagatgaagcgtatattaagcgaatgattaaacaaggttaccaaatgatttttacatctgtacaaataccagaagaagatgacgagacaaaatatcattatttcacaaaactactcaatttattaaaacatgaacaagtgacttacctcatagatgctaatccatctattttaacaccatctttttatgaccatcttcgacaatatgatgcacaatttatgattcgtatcgatcatagtacatcaattgaggcaatcgaagcgataatggcacagggtttaaagtgctgtttgaatgcaagtattatttcccgggaattgttaacaagcttacatcaacaattgaatgattttacattactttcattttgtcataactattatccaagaccagatacgggattatctgttgacttggtcaataagaaaaatgaactcatttatcaatttaatccaaaggcacaaatatatggttttattgtagggagtgatttgcgaggtcctttgcataaaggcttgccaacaattgaagcaacgagacatagtcatcctgtcgttgcagctaaattattacaagaaactggtgtatctgaagtgttagttggagactcattgattgaaatgaggcaggcaaaacaacttatagatttttgcaagcataggcatttcacgttatgtattgaagaagtgtttgatacgacagtgacttaccttttcgatatgtgtcataaagtacgcccggataatccggaaaatgtcattcgttcggaaacgtcaagacaaatatgtccacattcgattcaaccacagtttacgacgcaacgacgcattggttcagtaaccgttgataatttgaataacggacgttatcaaggcgaaatgcaaattgtgagacaaacgcttagtgcacatgacaatgtgaatgttgttgcacaaattattaaagaagacttaccactgttaagttgtatcgagccgaatgatacatttgattttcaaaaaactagggagtgtaagaagtgatggaaaatagtacgaccgaagcgcgtaatgaagcgacgatgcatcttgatgaaatgactgtggaagaggctttaattacgatgaataaagaagatcagcaagtcccgttagcagttcgaaaggcaataccacaattgacaaaagtaattaaaaaaacaattgcacagtataaaaagggtggacgattgatttatatcggtgcaggtacaagtggaaggttgggtgtcttagatgcagcggagtgtgtacctacattcaatactgaccctcatgaaattataggtattattgctggtggacaacatgctatgacgatggctgtagaaggtgcggaagatcacaaaaaattagcggaagaagatttgaaaaatatagatttaacatcaaaagatgtcgttataggaattgccgcgagtggcaaaacgccatatgttataggcggtttaacatttgctaacacaatcggtgctacaacagtatctatttcatgcaatgaacatgcagttataagtgaaattgcgcagtatccagtagaagttaaagttggtccagaagtattaactggttcaacacgtttaaagtctggtacagcacaaaagttaattttaaatatgatttcaaccatcacaatggttggtgtcggaaaagtttacgataacctcatgattgatgttaaagcaaccaatcaaaaactgatcgaccgttcagtgcgtattattcaagaaatatgtgctatcacatatgatgaagcaatggcgttatatcaggtatctgagcatgatgtgaaagttgcgacagttatgggtatgtgtggcatttctaaggaagaagcaacaagacggttattaaacaatggtgacattgttaaacgagcaatcagagatagacaaccttaggagggatttaaatgaccaaagaacaacaacttgcagaacgaattattgctgcagtaggtggtatggataatatagatagtgtcatgaactgtatgacacgtgtgcgtattaaagtattagatgagaataaagtagatgaccaagaactaaggcatattgatggtgtcatgggtgttatacacgatgaacgcattcaagttgtggttggacctggtacagtcaataaagtggctaatcatatggcggaattaagtggtgttaaactaggtgacccaataccacaccatcacaatgatagtgaaaaaatggactataaatcatatgcagctgataaagcaaaggcgaataaggaagcgcataaagcaaaacaaaagaatggtaagttgaataaagtattgaaatcaattgccaatatctttataccgttgattcctgcatttattggagctggattaattggtggtattgcagcagtactgagtaacttaatggtggcaggctatatttcaggtgcttggattacgcaacttataacagtatttaatgtcattaaagacggtatgttagcatacttagctattttcactggtattaatgcggctaaagaatttggtgcgacaccaggacttggtggcgtgattggtggtacaacgttattaacgggtattgctggtaaaaatattttaatgaatgtcttcactggagaaccattgcaacctggacaaggtgggattattggcgttatttttgccgtttggattttaagtattgtcgaaaagagattacataaaattgtgccaaatgcgattgatattattgtaacgccgactattgcattgttgattgtaggactattaactatctttatctttatgccattagcaggttttgtttcagacagtttagtttcagtagttaacggaattattagtattggtggcgtatttagtggatttatcattggtgcaagcttcctaccgttagttatgttagggcttcatcatatttttacgccaattcatatagaaatgattaaccaatcaggtgctacttacttattgccaattgcagcgatggctggtgctggacaagtaggtgccgcattagcactttgggtaagatgtaaacgcaacacaacattacgtaatactttaaaaggtgcattgccagttggtttcctaggtatcggagaaccattaatctatggtgtgactttgccattaggtcgacctttcttaactgcttgtattggtggtggtattggtggcgctgtaataggtggaattggacatattggtgccaaagcaataggcccaagtggtgtgtcactattaccattaatctcagataatatgtatttaggttatattgcaggattacttgctgcgtatgctggtggattcgtttgtacatatttatttggaacgacaaaggcgatgcgacagacagatttgttgggtgattaatgatgacaaatattttatatcgcattgataagcagttgagtgattttacgaagacagaaaagataatcgctgattacattttaaagaatccacataaaatcattgatatgactgtgaatgatttggcagatgttacgaatgttagtacagcatcaattgttagatttagtcggaaaatgacacatcaaggttttcaagagctaaagattgcgatatctcgatacttacccgaagatattgcaaccaatccacatttagaattgattgaaaatgaatctgtagaaactttgaaaaataaaatgattgctagagcaacgaatacgatgcgatttgtagctactaatattatggatgcgcaaattgatgcaatttgtgatgtgttgaaaaatgccaggacaatatttttatttggatttggcgcatcgagtttgactattggtgatctttttcaaaagttatctcgtattggcttaaatgtcaggttattacatgaaacgcatttacttgtgtcaacatttgcgacgcatgatgatagagattgcatgatttttgtgacgaatcaaggtagtcatagtgaattgcagtcaattgcacaggtggccacacattacagtattcccatcataactatatctagtacagctaataatccagtggctcaaattgcagactatgcattgatttatggcagaactgatgaaaatgaaatgcgtatggcggctacaacgtcactatttgcacagttattcacggtagatatattgtactatcgatttgtagcattaaattatcatgcgattctagattgtataacccaatcgaaaatggcacttgataattacaggaagcatcttgcgacgatagattttaaacattagatattgtgtgcgttctaacataaagttagttgcaacgtaaacaattgaagtttttgatgtgattcagttgcttgatgaaaaattgttgctacaagtttgtaaaactggcatagaggctattttgaaaatgataaaggcgtgacaaattaaagcaaagttcagatttgagctttgcttttttcatagatggaaattaaatgctgaagaataattttaatgctaaatgaactaatacgaaggtgctaaaagcaattattatcaaattagtgatatgaatgaaatgtttaaatcgtttgcgttgattgtattcgggacttttatagagtaggtagtagtacataaagagtatggctgcgaacatgccgaatattgaagtgaagttacctacagtgactgccatgtaatgatttaaagttaaatagtaacttagactaataataaaaaataaaatgatttgataggtaattaacaccattcaagtccctccattaatcgtagacaaaaaatttatcaatgatttgattatttgtattcaaattttagtatacgacttacctcaaagacaaatattaaaagataagacaataaaattagaataaatttacgtttgaagataaaaaacaaacatttttcattaaagtttatgatatatttagagcaatagaaagtgtatggaaggggatatgaatggcataccaaagtgaatacgcattagaaaatgaaatgatgaatcaacttgaacaattgggttacgaaagagtaacgatacgtgataataagcaattgcttgataattttagaacgattttaaatgagcgtcatgcggacaaattagaaggcaatcccttaacagataaagaatttcaacgtctgttaacgatgattgatggaaaaagtattttcgagagtgcccgtattttacgtgataaattaccacttagacgtgatgatgagtctgagatttatttgtcgtttttagatacgaaaagttggtgtaaaaataagtttcaagtgacgaatcaagtatctgtcgaggatacatataaagcacgttatgatgtaacgatattaatcaacggactaccccttgtccaagttgaattgaaacgtcgaggtattgatattaatgaggcgtttaaccaagtaaaacgttaccgcaaacaaaattacacaggcttattccgctacatacaaatgtttatcattagtaatggtgttgaaacgcgatacttttctaataatgatagcgaactattgaagagtcacatgttttattggagtgataaacagaataaccgtatcaatacattgcaatcgtttgctgagtcatttatgagaccttgtcaattagctaagatgatatcgcgctatatgattattaatgaaacagatagaatactgatggcaatgcgtccgtatcaagtgtatgcggtagaagcacttattcaacaagcgactgagacagggaataatggatatgtatggcatacaactggaagtggtaagacgttgacttcttttaaagcgagtcagattttatcacagcaagatgacattaagaaagttatctttttggttgaccgtaaagacttggatagtcaaacagaagaggaatttaataaatttgctaagggtgctgtagacaaaacttttaatacctcgcaactggtacgccaactaaatgataaaagtttgccacttattgtaacgacgattcaaaaaatggctaaagcgattcaagggaatgcccctttattagaacagtataaaacgaataaagttgtatttattattgatgagtgtcatcgcagtcaatttggtgacatgcatcgtctagttaaacaacatttcaaaaatgcccaatactttggattcactggtacgccacgttttccagaaaatagtagtcaagatggtagaacaactgcagatattttcggtagatgcttacatacgtatttaattagagatgccattcatgatggtaatgtacttggtttctcagttgactatattaatacttttaaaaataaagctttaaaagcagaagataacagcatggttgaagcaattgatacggaagaagtatggttagcggataaacgtgtggaattagtaacacgacatatcatcaataatcatgataaatatacacgtaatcgtcaatattcaagtatatttacagtccaaagtattcacgcgcttattaaatattatgagacatttaagcgacttaacaaaaagttggaacaaccgttaacgatagctggtatatttacgtttaaacctaatgaagatgatcgtgatggtgaagtgccatatcattcacgtgaaaaattagagataatgattagtgattataataaaaagttcgagacgaatttttcaacagacacaactaatgagtattttaatcatatttcaaaaaacgttaaaaagggcgttaaagatagtaaaattgatatcttaatcgttgttaatatgttcttaactggttttgatagtaaagtactgaacactttatatgttgataagaatttaatgtatcatgatttaattcaagcgtattcacgtacaaatagggttgaaaaagaatcaaagccatttggtaaaattgtaaactatcgtgacttgaaaaaagagacagacgatgcactgagagtattctcacaaacaaatgatacggatacaattttaatgcgcagttatgaagagtataaaaaagaatttatggacgcttatcgtgagcttaaaatgattgtgccgacaccacacatggttgatgacattcaagatgaagaagagctaaagcgctttgttgaagcttatcgtttattagctaaaataatattacgtttaaaagcatttgacgagtttgagtttacaattgatgaaattggaatggatgaacaagagaatgaagactataaaagtaaatatttagctgtgtacgatcaagtaaaaagagcgacggctgagaaaaataaagtatccattttaaatgatattgatttcgaaatagaaatgatgcgtaatgatacgattaatgtgaattatattatgaatatattgagacaaattgatcttgaagacaaagcggaacaacgtcgtaaccaagaacaaattagacgcattttagatcatgcagatgatccgacattgaggttaaaacgagatctaattagagaattcatcgacaatgttgtaccttctttaaataaggatgatgatatcgatcaagaatatgttaatttcgaaagtattaaaaaagaagcggagttcaaaggatttgctggagagagatctatcgatgaacaagccctaaaaacaatttcaaatgactaccagtatagtggtgttgtaaacccacatcaccttaaaaaaatgattggtgatttgccattgaaagaaaagcgtaaagcaagaaaagccattgaatctttcgtggcagaaacaactgaaaaatacggtgtgtaatgattcagccccctcgctagattagtgtagggggcattattattttctatcttttgttagttaccatgtgtttggcaaccatcatttggtttcaatacaattttataatcgtatgtgtatagaaataatgtctataggcatttaaaatagtttataatattaacaggataagcattaaatgtatgttgaaggaggtgcgtagctatggataatagaaatatgattaatcgtgtttttagtcaaaagatattacatcaaattgcaatcaaaaataaaagtgatgttgttgatgaggcatatgatttttatatacagggacctaaaaatatcaatgtaatacagaagatgaaatctttatataactatcttaaaaagtcttatcgtaacgaatatttttacaaaaacacaatacttaataaactccttctaggacgacattctattaatacaactactgcactttctgagatgcccatagggaaaagtattgctgattttatattgttaaacggcaaaggcgttgtctatgagattaaaacagaattagataagctggatagattagataatcaaattaatgattattatgaagtgtttaattatgtcgtagttattacaaatgacaaacatctgaataaagttatggctagatacaaagatacaacagttggaattttagtgttaacaactagaaatacactgagtgaagttcaaaaacctaaagaaaacaatagtctcttaaacacaaaagcgatgtacaactttttacgaaaagaagaaagaaaaagagttattgcacaaaatcatatggatgtgccaacttataatgatttcacagagtatgatgtgttatttgacgtgtttaaagaaataccaatgacgaaactgcataacaatatgatttctgagttgaaaaaaagaggaaacatgaaagaatacaaagatgaatttttagcagcgccggctgaaattaagttcttgttatatttcgcaaaaatgacaaagaaagataaaaataaactatatcattttcttaaggaggattaatatgtattatccttatttgcgtgggaaacaaaatgaactatttgcaattagagaattgttagagaaaggtttgattggtgattgtattcaacctataattgaaccaattaaatatacaaccacatttaaaaatactttgcaatactgtggtgaaaaagcattctctataaatttagtagtaaattcaaagttaactgaagaagagattagtaacgaaactgttgcacatttaactgaaataataacaaaaaacaaaagtgttattcaaaaagcttacttgggtccttctgatgaaggcaatgataggttgaaacagcaattttcaagtaatagtttagctattttaacaagtgtagatgattgggaaatgtttggagataaaaataaacttgaaatggtttttgtaccagatgatagacacattaaacgtaaattgcgtaatattccaaacaaaggcatcattatggatccttttaataaactaagtcgtaatgttgattatttagataatgatgacgagttttatagcgacgatcacctttattataaggaagatggatacgtagcattttcagactattctgttataggtggagaatatgtagacggtggcttttcgccattagctattgcgatacatattgtctattttgatgaggctaatgagctaagagttaagcattttgtctctgattctaataatgatagatcaaatccaggtaaaaagttttttgaggctgtagataaattagtaacatggtcaaaaaacttagatattaaaaatagatcttatgcgcttggacaatttgaagaattaaatgaaaataataagtatccaggattaggtttaattaaaaggttatctatcatgcatcacctagaaattatgaatagatacttggagtctcaaaatgaaaatatgtgaaaaatgttttaataatactgaaatcgtagaaatcattgcaaatgataatagcaaatttgacaattgtgatattgataacaatcatcttggtgttaaaatatttgatacgactaaggacatagataaattagaacttattagagattatttaagaccagcattagaattatatgatattagtataaatttaccagatacttttagcccaaaagaaggtaaaaagattgaaatagcattaaaagacgactggagtatatttaatgttgaggaagctcaaataagttgtattttaaatgaactttttaaagatgatgaaaatttagatagacgagtgttggaagatttagtaggcgctaaaatcataaacgataaaaaatatacaaataaaaatctaattgtagcaaataatgactgggatggattttgtgagagcttgaagtataaaaatagatttcataaaaatatgatcaatttagagaatttagcgttctttctcgatatcactactaattactatagtattgaggaatttagagaaagatttgaaccattatatagatctagaatagttaagttcattacagagaaaagtgaactaatgtcaccaccaaagggatttgcaacggcaggaagattgaattctaaatggataagcgtattataccttagtacaaaagaacaggtcagtatagaagaagttaaacctaagcataatgacattatttatataggtaaggttaagttacaaaaaaacgtgacaaaagagaaattgaaaattgcgaatttaactaatttaactagtaatgcaatcaaagctggcgatgatggatttagaaagtattttgtaaattaccaaacattaaaaaagattcataaaggaataacaaatccaagcgatgaacaaggaatagattatttgccatttcaatatttagctgattatattcgaagccttaaatatgacgggataatgtatgagagcatattacaagatggtacttttaactttgtgttttttgatcaaagtttatttgaatgtgttaattatgaaagaaaaagagtaagtgacgttaaatatacattgactaagctaagttgacacactcaaaaatctgaatattctaataaaatataaataatcccccacacttcacatagtggcgggggatttattctggcgttaaaatgcccaaagtatgggggtgactcttaaatcatggcaaagcacctaaaacttgatatggtgccgagccctaacttagcacaatatagttagtatgacaaagtcatctaacataacacatcagaagtcgcgcaatttatttcagaccatacagtgataaagttgcacaacgcatgacttttatttagcaataactgctacttctgaaataagttgctttgcatagtctgactgcggatgtttgataatatcttctgtgttattcagttcaacgatttcgccatttttcataactgcaacgcgatcacatatttcattgataacacccatgtcatgtgtgatgaataaataagtgatgccgaagtctaactgtaattgttttaataactcgatgatatctttttgaattgaaacgtctaaagcggacactgcctcgtcgcaaacaatcactttaggttcaacagcaagtgctctcgcgatacttacacgctgacgttgcccaccagataattcgtgtggatagcgatataagaaagtttgatctaggccaaccttttctaacaacgatacgacagttttaataatgtcatcattatctttgactttcccatgaatgattagtggtcgtttaatcacatcaatgactttaaatcttggattaatagatgcgaatggatcttgaaaaatcatttgtatctcttgtcgtaaagatttcaattcatcatctttaaataaacttaatggtaattcgttataccaaataaagccttctgacacttcctttagaccgacgaccgtcttagctaatgtcgatttccctgaccctgattcaccgacaatgcctaatgtttcgccttttctaatagccaagttaatatcattaactgctcggtataggctgccactcggtgatgtgtaatccacgctcacgcgatcgaattttaataaaatatcattgtttaacggtcttggcggacgcgtttgatgaatatcaggaatcgcatctattaagcgttttgtataggtatgttgtggcgatttaaaaatactttcaaccgtgccactttcaacgacacttccatctttcattacaatcacatcgtcgcaaaattgatacacagcgcctaaatcgtgagtgataaaaataatagatgtttctgtgtactcataaagggacttcattaactgcagtaattgattttgtgtactggcatctaatgccgttgttggttcatctgcgattaaaatttgtggctttaaaatcaatgccattgctatcatgacacgttgacgcataccaccagaaagttcatgtggataagcatcaaattgtcgagttgcatgttttatacctactttttctaaaatgtctattgtcatcgactttgcttcagatttagatacacgtttatgttgaaatattacttctgtaatttgtttgccaatcgttaatcttggattcaacgaagagagtggatcttgaaaaatcattgaaatatccttacctcgaatttgttgtaacgctgaagttgataaattatttaacgattgcccattaaaaataatttctcctgttaatgtgtgatctggataatctggtagtagccctaaaatagatttagcggtaatactttttcctgatcctgattcaccaacaatacctaggatatgtttttttcgtaattcgaaagagacgttttttaccgcttgaactgtagtttcatcataattgaattgtacattcagactgttgacttctaataaatttgacatgatgttgtgcctccctattcacaaatgtgtaaatttattctatacttttgtatatcatagtaatctactcaagattattttacaaggagtgattatcataattacttatttagaatcttttaagtcgttgtatcacaaggcattttacaagtttgtattatcggtattaagcttgccaatatttttatatgcagtgataaagtttttcttttctgctaagaggaaaaatttttacgctaataattctgaaatttcagaaattgaacaggcgttacatcaaaaatataaatatttatcgcagcaaaagtcatccacacaaatacataaagaagcattaaaaatattcaaggcacaaagttctaatacgagttcaaagaatattgaacaagcacatttttcaacatactttgaaaatgtattatttcataagttcatcatgatcaaagtgatattggccttgccgatgttcatcttattgactttttatttacagccattagttagatatatttttgaacgaattgtcatggctgtgattgtcatcattggtgttattgtcagtgtgtttaccattctgtatttttcaccgcttgatgcggcttatagcatactgggacaaaatgcaacaaaggcacagatacatcaattcaatgtattacatcatcttaacgaaccttattttattcaattgtgggataccatcaagggtgtttttacctttgacttaggtacgacttacaaagggaatgaggttgtgactaaagcagttggcgaaagaattccaattacaataattgtcgcagtattagcgctaatggtggcattaattattgcaataccaattggtattatcagtgcgatgaagcgaaatagttggcttgatatcacgttaatgataattgcattaattggtttatctattccaagtttctggcaagggctattattcattttagcgttctcattgaaattggatattttgccaccatcttatatgccagaacatccaatatcgttgattttacctgtacttgtcattggaacaagtattgctgcttctatcacgcgtatgacaaggtcttctgtacttgaagtaatgcgcagcgattatgttttaactgcttatgcaaaaggattatcgacgacacaagttgttattaaacatattttgaaaaatgccattattccaattgtaacgttagttggtcttctagtggcagagttactaggcggttcagcagtgacggaacaagtatttaacattaatggtatcgggcgttatatcgtccaaaaacaactaatacctgatattccagcagtcatgggtggggtcgtatatatatcaattgtaatatctttagcaaacttaattattgatatattttatgctttaatcgatccaaaattacgtagtgaaatcaacgaaaggaagtgaggcatatggcacaacttaattcaaagatagcttccttaaaattattcgcaagttacgccatagcaacttatattttagttatattaacgagtgcattaaatctttttaaaggttatgtggccgatacgttctatattgctgaaacattgctaatcgttttaaccatcattttaattattattttaacaacggaacaaacatggaagcatcatgacctatggcgacgtatcgtcgaagtgttgttattgttgatgacattaacaggcaacgtatttacattattaatgtttgtaagtattagacgttaccaacgtacatcgcaaatacatagttataacgggtgggaatcgtttatacgaaaaactactagacatcgtattgcgattatcgggttacttattttagtctacatgctgacattatcaattgtgtcacaatttacatttgatacgacattggctactaaaaatcagttcaatgcactgttacatggaccgagtctagcctatccgtttggtactgatgatttcggtagagacttatttacacgcgtagttgtaggaacgaagctgacattttcaatttcaattatttcagtagttattgcagttatttttggtgtgttactaggcactatcgcaggttattttaatcatattgataatttaataatgcgaattttagatgtagtgtttgcaattccatcattattgttagcggtggcaattattgcatcatttggagcaagtattccaaatttaattattgctttaagtatcggtaatataccatcatttgcacggacaatgcgtgccagtgttttagaaattaaacgcatggaatatgtagatgcagcacgtatcactggtgaaaacacttggaatatcatatggcgttatattttaccgaatgcgattgcgcctatgattgtacgtttttcattaaatataggtgtggttgtattaacaacaagtagtttaagtttcctaggacttggtgttgcacctgatgtagctgaatggggcaacattttacgtaccggtagtaactacttggaaacgcacagtaatttagctattgtacctggtgtttgtattatgttcgtcgttttagcatttaattttataggtgatgcagtgcgtgatgcactagatccaagaattcattaaaaaggtagggatagatgtgaagaaaatcattagtatcgcaattatagttttagcgttggtattaagtggttgtggtgtccctacgaaatcagaagtggctcaaaagtcatcgaaagttgaagtgaaaggcgagcgaccaacaatacatttcctaggacaagcaagttatgaaaatgatatgaatatcgttaaagatcaattggaaaatgcaggatttaacgtgaagatgaatatccaaccagattatggtagctatcgtacacaacgtcaagccggcaattatgatatccaaattgatgactggatgacagtgtttggtgacccgaactatgctatgacggcattatttagttctacaggatcaaatagtttattgaaagataaacatgtagaccagttgttaaataaagcttctactcaaaatgaagcagatgttaaacaaacatataagcaaattgaagatgaagttgtatttgataaagggtatatggcgcctttatatggatcaaaaaagaatttagtatatgacaataaagtgttagataaaaatagtgttggattgccaaattcacgtgcattaatatggcaacaatttgattacaacaatagtagagaacgagatacgcggccacttgtgatgacacaacaagatggtgaaattcctacattggatccaatacgttcaattgcgccgtcagtatattcaattaatatgaatatgtacacaaggttattattattagatgaaaatgatcatttaacaacgaaaggttcgttaagtcatgattatgctgtgaataaggacaataaagcattttatttcttgttaagagatgatgattattttgcgaaagtggtcaatggacaagcacgtaatactggagagcgtgtatcggctgaagatgttaagttttctttagatagagcacgtgataaaaagtctgtgcctaacaataatacttacaatatgcacaaacatataaatgacatcaagatattaaaagatgaggacatcgatcagttgcgtaaagagaaagacaaggacgataaatcaatctatgataagttgattaaagcttataacgtcaaatcgttaacgacagatggtcaaaaagtaaataataaagacggtatttatcaaattgttaaaattacgacagatcaatcgatgcctcgagaggtaaattacttaacacactcttcggcaggcattttatctaaaaaatttgttaatcaagtaaatcaagaatatccaaaaggatatggggatagcagtacaattcctgcaaattcagatgggaaaaatgcgctgtatgcaagtggcgcatacattatgacacagaaaaatgcatatcaagcaacgtttcaacgtaatccaggattcaacgaaacagaaaaaggtagttatggaccagctaaaattaaaaatattacattgaagtttaatggtgacccgaataatgcattgtcagaacttagaaatcattcaattgatatgttggcagatgtgaatcaaaaacattttgatttaattaagtcggataaaaatttaagcattattcgcaaaaatggacgcaagtcagtctttttaatgctaaatattaaaaaaggtatatttaagacgcatccaaacttgagacaagcagtagttaatgcgatagatcaggatcaatttattaagttttatcgtggcgataaatttaaaattgcatcaccgattacaccacttgtcgatactggtaacgagcaacgtcaagatttagaaaaagtagaaaaagccattaatcaataatgttttaaatatttaacagaaagtaggaggatatagtatggtcattaacttaaatgacaaacagacaaaaacatctaaagaagggttaatttccgtatcacatcctcttgcggctaaaattggtaaggatgtattagatcaaggtggcaacgccatggatgcagtgattgcaattcaactggcattgaatgtggtagaaccatttgcatcaggtattggtggtggcgggtatttgctatattatgagcaaagtactggcagtataactgcgtttgatgcacgtgagacagcacctgaacatgtagacaaacaattttatctagatgattcaggcgaatataaatcattttttgatatgactacacatggtaaaactgtcgctgtgccagcaattccaaagctgtttgattatattcacaagcgttatgctaaattgtcattggaagatttaattaatcctgcaattgaactagccattgaaggtcatgcagccaattgggctactgaaaaatattcgcgccagcaacacgcacgattgacaaagtatcatgaaacggcacaagtatttacgcatgaaaatcaatattggcgtgaaggtgattggattgtacaacccgaattaggtaagacatttcaaatattaagagaacaagggtttaatgcattttataaaggtgacattgcgaaacaattagtcaatgttgtcaaagcatgtggtgggacaatcactttagaggatctagccaaatatgacattcagattaaagcgccaatcagtgcaacatttaaagactatgacatttattcaatgggaccatctagttctggcggtatcacggtaattcaaatattgaagttattagaacatgtcgatttaccatctatgggtccaagatctgttgattacttgcatcatttgatacaagcgatgcatttagcatatagtgatcgtgcgcaatacttggcggatgataattttcatgaggtgcctgtacagtcattaattgatgatgattatttaaaagcacgcagtacgctcattgatagcaataaagcaaatattgatatagagcatggtgttgtgtctgattgcattagtcatacagatgttgaagaaaatcataccgaaacaactcatttttgtgtgattgataaggaaggtaatattgcttcatttacgacatcaattggtatgatttatggttcaggtatcacgattccaggctacggtgtgttattgaatacgacaatggatggctttgatgtagtagatggtggtattaacgaaattgcaccatataaacgaccactaagtaacatggctccaacgattgtgatgtatcacgggaagccaatattaacagtaggtgcacctggtgccataagtatcattgctagtgttgcgcaaacattaatcaatgtattagtgtttggcatggatattcagcaggctatagatgaacctagaatttatagtagccatcctaatcgcattgaatgggagcctcaattttcacaatctacaatattagcattgattgcacatggacatgcaatggaacataaaccagatgcttatattggagatgtacatggactacaggttgacccaacaacgtatgaagcttcgggtggaagtgatgatactagagaaggcaccgtaatgggtggcgaggtgttagtgattagaaaacagccattaccatatcggcaaatgtatgatagtgacggctttcgtctatatttcaatgatgtgcagttacctttattggcagatcaagtgcgatggatgcatgacaaatattgggttgatgaaagtgttgttagaatcattttccctgaagttagtgcacatattgaagatttaagaagttatgaaaacgcaggagaaaattatatagatattgcctggttagcacggaaatatgcttatcaagtaacattgaaggatgacggtttatacttaactgatgatacatatacttcagtgaaacggaacacaaatgcatactatagatatgatcgagatagtatcacaagatagtttatacgcttgatatgaagtttgtagtggatatgagcttttgttgaatgaaaggattcgatttcgaactttagcgtgacgcttgagtgtagtaatgttggaaatgctatacgaaacgctagtcacctttgtaaaatatacaacgcctcacaaattcgtttttgatgtacatcacaatagttagcctaaaatctaatgtaatgtggtttggtacagttgaacgagttatgtgaggtgtttttataatataggattttaatagatgatttggatgtttctataattacagcataagtattaatgttcacttattttattataagtaaggctttctttataaatgatttggtcttttccaggacttgaaaaataaaaataaagtttctgatcttgatgattattgccttttaaatcactcattccctttaattccacctttgttgatgcgtttttaggaatattatatctacgttttaattgtttaacgtttggattatcgttcgacaacttaccagataaattataataatcagtggtaggatcatgtgtgactttcaaatcattgctatttaaaatgcttgttaaatcaccactttgaatcaaaaattgattgttttcgattttttgtttcagcgcgggatcttttacgtcttttgtgaaaacgattttattattaactacttttactggataacttttgtatgtcgagtcagtagcattttttctatcgtttgtagttgtgtcatattcaccagttattttatgtgtgttcttatctacctttaacaacatacggtcttcttttaaaagctcatctgatccaacaactgaataagaggattctatataccatgtgtcttgatcattattttcataatggggattatcgtgaccatcaatttcataaagcgtttctaagtttttaataggatacgtacttagtacttttttaagaccatctttcaaatgaatttgttcccacttcattgccaaaaacatatcgccactgactacaattgaaataataataattgctgctaagtttaaccagaaaattttatgtgctttcatacattcccaccgtttctcaaaatacttcattaacactataataatatattttgaaaaatatttacatcagtattaaagtgaatatcaaattttaaatttatgaaaataatagatatttataaaaagcggaaaagagatacaataaaaaactgcatgacgtttgagacgtcacacagtgtaactaaaaatttaaaaagttgttgctaatttttcagcattattaatactagttgctttaatttcttcagtcttatgaggttcagcattgtgtccttcaataatgattgtttcatatgatggcacacctaagaatgtcataattgttcttaaataacggtcacccatttcaaaatcagcagcaggtccttcagtataatatccaccacgtgattgaatgtgtaatacttttttgtcagttagtaaaccttgtggtccttcagcagaatatttaaaagttttacctgcaattgaaatagcatcaatatatgctttaactacaggtgggaaagaaaggttccacataggcgttacaaatacatatttatctgcacttaaaaattcttctaaaatgtcactcaatcttgaaactttcatttgttcatcatcagttaacgtttcgccattactcatttttccccaaccagttaatacatctttgtcaataactggaatataagtttcaaataaatcaatatgtttcacttcatcatcaggatgttgttgttgatatgtttcgataaatgctttaccagccgccatagaatttgataccagttcattaaaagggtgtgctgtaatatataatacttttgccatttgaaaattctcctctgtttctgttattttcttaagtataattattatactcgatataaaatttaatatcaatcaaaatattcaaattaccatcattttcttcatctatatttggcagtactactaaagtatgagtgcatttaattatgaaatagttgatttagaatatatacttaatacccaaaatatatgaaggatggatgccactatgacaaagcgaccaaaacgtattttggcaacaattatcatttttctttcactattatttacgattatttatatagatgacattcaaaaatggtttaaccaatataccgataaattgacacaaaatcataaaggacaaggacactcaaaatgggaagacttttttagagggagtcggattactgagacttttggtaaatatcaacattcaccatttgatggtaagcattatggcattgattttgcattgccaaaaggtacaccaattaaagcgccgacgaatggtaaagtaacacgtatctttaataatgaattgggcggcaaggtattacagattgccgaagacaatggagaatatcaccagtggtatctacacttagacaaatataatgtcaaagtaggtgatcgagtcaaagcaggtgatattattgcatattcaggcaatacaggtatacaaacgacaggcgcacatttacattttcaaagaatgaagggtggcgtaggtaatgcatatgcagaagatccaaaaccgtttatcgatcagttacctgatggggaacgtagcctatatgatttgtagttatagaagggtgcccgcagtctaaaaaattaagcaatcattgtgtgagtatgatacttacataatggttgcttttttcaatgaaaatcgtaatgctaagtcatacttgtttgatttagatattacttaaaatgtaagacaaggttgttagcattggcagtgaaatatcgcacataaaaaacattattgtcacactagaaaatagttgtgcactatatcaattttctgtataaaagtttaattctgacagtaatgtaaacgtttacaatttatgattgacattaataatgactgaatatatgatttatgtaagtatttgtgcaaacgttttcacaaagtgtattgcacaatcaaactgtaaacaaagtatgggaggcataacatggcagaactaaagttagagcatattaaaaagacgtatgataacaacaatactgtagtgaaagattttaatctacatattactgacaaagaattcattgtatttgttggaccatcgggatgtggtaaatcaacaacattacgaatggttgctggactagagtctatcacatctggagatttttatattgatggggaacgcatgaacgatgttgaaccaaagaatagagatattgcgatggtatttcaaaactatgcattatatccacatatgactgtttttgaaaatatggcatttgggctaaagctacgtaaagtaaataaaaaagagattgaacaaaaagttaatgaagcagctgaaatattaggattaactgagtatcttggtcgtaaaccaaaagcgttatctggcggacagcgtcaacgtgttgctttgggcagagctattgttagggatgcgaaagtctttttaatggatgaaccattatcgaatcttgatgcgaagcttcgagtacaaatgcgcacagaaatattgaaattacataagcgacttaatactacgacaatttatgttacacatgatcaaactgaagcattgacgatggctagtcgaattgttgttttgaaagatggcgacattatgcaagtcggcacacctagagaaatatatgatgcccctaattgcatatttgtggcgcaatttatcggctcaccagcaatgaatatgttgaatgctacagttgaaatggacggattgaaggtaggaacacaccattttaaattacataataaaaaatttgaaaagttaaaagctgctggctacttagacaaggaaattattttaggtattcgagctgaagacattcatgaagaaccaatatttattcaaacttctccagagacacaatttgaatctgaagtagttgtatccgaactgttaggttcagaaattatggtacatagcacattccaaggaatggaattgatttctaaattagattcaagaactcaagtgatggcgaacgacaagattacactagcatttgatatgaataagtgtcacttttttgatgaaaaaacaggaaatcgtatcgtctaagggggagtattcatgtctaaaattttaaaatgtatcacgttagccgtggtaatgttattaatcgtaactgcatgtggccctaatcgttcgaaagaagatattgataaagcattgaataaagataattctaaagacaagcctaaccaacttacgatgtgggtggatggcgacaagcaaatggcgttttataaaaaaattacggatcaatatactaaaaaaactggcatcaaagtaaagcttgtaaatattggtcaaaatgatcaactagaaaatatttcgctagacgctcctgcaggaaaaggtccagatatctttttcttagcacatgataatactggaagtgcctatctacaaggcttagctgctgaaatcaaattatcaaaagatgagttgaaaggtttcaataagcaagcacttaaagcgatgaattatgacaataagcaactagcattgccagctatcgttgaaacaaccgcacttttttataataaaaaattagtgaaaaatgcaccgcaaacgttagaagaagttgaagctaatgctgccaaactaactgatagtaaaaagaaacaatacggtatgttatttgatgctaaaaatttctattttaattatccgtttttattcggcaatgatgattatattttcaagaaaaatggcagtgaatatgatattcatcagctaggactaaattcaaaacatgtcgtcaagaatgctgaacgattacaaaaatggtacgacaaagggtatcttcctaaggcagcaacacatgatgtcatgattggtctttttaaagaaggaaaagtaggacaatttgtcactggaccgtggaacattaatgaatatcaagaaacgtttggtaaagatttaggagtaacaacattacctacagatggtggcaaacctatgaaaccatttctaggtgtacgtggttggtatttatctgaatatagtaaacataagtattgggctaaagatttaatgctgtatatcactagtaaagatacattacaaaaatatacagatgaaatgagcgaaattactggacgtgttgacgtgaaatcatctaatccaaatttaaaagtgtttgaaaagcaagcacgtcatgctgaaccgatgcctaatattcctgaaatgcgacaagtttgggaaccgatgggcaatgcaagcatatttatttcaaatggtaagaatcctaaacaagcgttagatgaggcgacgaatgatataacgcaaaatattaagattcttcatccatcacaaaatgataagaaaggagattagttatgacgaaacgtaaccctaaattagcggcattattatctgttatacctggtttgggacagttttataataaaagacccattaaagggacgatattttttatctttttcatcagttttatttctgttttttatagctttttaaatattggtttttggggattgttcacattagggacagtacctaagttagacgattctcgtgtcttacttgcacaaggtattatttctatcttactcgttgctttcgcaatcatgctatatatcattaatattttagatgcatatcgtaatgctgaacgatttaatcgcaatgaggaaataaaggatccgaaggcgcgtatggtggcaacatgggacaagacgttcccatacttactaatctcaccaggtacattcttattgatatttgtagttgtatttccattaatatttatgtttggagtagcatttacaaattacaatttatacaacgcgcctccgagacacacattagaatgggttggtttagataactttaaaacgttattcacaattggcgtttggcgtaaaacatttttcagtgttattacttggacattagtatggacgcttgttgcaacgacacttcaaattgcattagggctgtttttggcaattattgtaaatcaccctgtcgtcaaaggtaagaaatttatccgtactgtgttaatcctaccttgggctgtaccatcatttgtgacaattttaatatttgtagcgttatttaatgatgaatttggtgcgataaataatgatattttgcaacctttattaggtgtagcaccagcatggttaagtgatccgttttgggcaaaagtggcattaatcggcattcaagtatggcttggattcccatttgtctttgcactgttcactggagtactgcaaagtatttcatcagattggtacgaagcagcagatatggatggtgcgtctagttggcaaaagtttagaaacatcacattcccgcatgtcatttacgccacagcgccattgttaattatgcaatatgcaggtaatttcaataattttaatcttatttatctatttaataaaggcggtccaccagtgtcagggcagaatgctggtagtacagatatcttgatatcttgggtgtataatctgacatttgagtttaacaacttcaacatgggtgcagttgtgtcattaattattggatttattgttgctattgtcgcatttattcaattcagacgtacaagtacgtttaaagatgagggaggtttataagatgacaaagaagaaaaacatattaaaagcaatcggtatttacagttttatagcgatgatgtttgtcatcattttatatccactactgtggacatttggcatttcccttaatccaggtacgaacttgtatggtgccaaaatgataccagacaatgcaacatttaaaaattatgcattcttactattcgatgacagtagtcaatacctgacttggtataaaaatacgcttatcgtagcatctgcaaatgcactgtttagtgtgatatttgtcacgttaacagcatatgctttttctagatatcgctttgttggtcgtaaatacgggctgattacatttttgattttacaaatgttccctgtattaatggcaatggtcgcaatctatattttgctaaatacaattggattattagattctttatttggactaacactggtatatattggtggatcaataccgatgaatgcctttttagtgaaaggttacttcgatacgattccaaaagaacttgatgaatctgccaaaattgatggtgcagggcatatgcgtattttcttacaaattatgcttccattagctaagccgattttagcagttgttgctttgttcaattttatggggccatttatggactttatattacctaaaatactattaagaagtcctgaaaaattcacattagcagttggattgttcaactttattaatgataagtatgcaaataatttcacagtgtttgcagcaggggcaattatgattgcagtacctatagcaatcgtattcttgttcttgcaacgctatttagtatcaggtttaacaacaggtgcgacaaaaggttagtttgaaattaggagtggggcagaattgataaagaaccactaatgacgataaagattaaaaggaggacgttatgatgacgattaaagttggaatcattgggtgtggtggtattgcgaatggcaagcacatgccaagtttacaaaaagttgaaaatgttgaaatgatcgcattttgtgacgtagacatttcgaaagcagcgagtgcggcagaagcatacggaactgacaatgcaaaggtttatgatgattacaaagcattgttaaaagatgacacgattgatgttatccatgtttgtacgccaaatgactcgcattgtgaaattactgtagcagggttgcatgctggtaaacatgtgatgtgtgaaaaaccaatggctaaaacgacagcagaagctcaaaaaatgatagatacagctaaatcaacaggtaaaaaattaacaataggttatcaaaatcgtttccgagcagatagtcaatttttacatcaagcagcgcaacgtggcgacttaggagacatttacttcggaaaggcacatgccattcgtcgtcgagcagtaccaacatggggtgtctttctagacgaagaagctcaaggtggaggaccattaatcgatatcggtacacacgctttagatttaacgttatggatgatggataattatgaaccagaatcagtgatgggttcaacattccataaattaaataaacagcatcatgcggcaaacgcttggggttcatggaatccagatgaatttacagttgaagattctgcgtttggatttattaaaatgaagaatggagcgacgatcattttagaatccgcttgggcgattaattctttagaagtggatgaggcaaaatgttcattatcaggaactaaagcaggtgctgatatgaaagatggtctacgtattcatggtgaagacatgggtacactttataccaaacacgttgaattggaaaacaaaggcgtcgacttttatgaaggtaatgaagtggatgaagctgaagaagaagcaaaagcttggattgatgcagttgtaaatgatactgaaccagttgtgaaaccggaacaagcaatggtagttacaaaaattcttgaagcgatttatcagtctgcaaaatcaggcaaagcaatttactttgaataacatcatacggtaaggaggcacatcatgacaaaattaaaagttggtgtgataggtgttggtggtattgcacaagaccgtcatattccagcattgctgaaactcaaagacacagtctcattagttgcagtacaagatattaatacagtgcagatgattgatgttgcgaagcgctttaatatacctcatgcagttgagacacctagcgagctgtttaaacttgttgatgcggtggtcatttgtacacctaataaattccatgctgatctttctatagaagcattgaaccatggtgtccatgtattgtgtgaaaagccaatggcgatgacgacggaagagtgtgatcgcatgattgaagcggctaataaaaatcacaaattattaactgtcgcatatcattatcgtcacacagatgtggcaattactgctaaaaaagcaattgaatcaggtgtggttggtaaacctttagtagcacgtgtacaagcgatgcgtaggcgtaaagtgcctggctggggtgtttttaccaataaagcgttgcaaggtggcggtagtttaatcgattatggttgccacttgttagacttatctttgtggctactaggtaaagatatggtgccgcatgaagtgctaggaaaaacatataatcaattgagcaaacaaccgaatcaaattaatgattggggaacatttgatcatactaaatttgatgtcgatgatcatgttactagttatatgacatttgccaatcgagcaagcatgcagtttgaatgttcgtggtctgcaaatatcaaagaagataaggttcacgttagtttatcaggagaagatggcggtatcaatttatttccatttgaaatatatgagccccgctttggaactatttttgaaagcaaagctaatgttgagcataacgaagacattgctggtgagagacaggcgcgtaactttgtcaatgcgtgtttagggatagaagagattgtggtgaaaccggaagaagcacgcaatgtaaatgcccttatagaagcgatttatcgtagcgatcttgataacaagagcatacaactttaatgattatcatatatgatacaaaattctcaatataaaaagaaggagtgcttttcaatgaaaataggtgtattttcagtattattttacgataaaaattttgaagatatgttagattatgtctcagaatctggattggatatgattgaagttggaacaggtggtaacccaggagataaattttgtaagttagatgagttgttagaaaatgaagacaagcgccaagcatttatgaagtcaatcacagacagaggcttacaaataagtggtttcagttgtcataacaatccaatttctccagatccgatagaagcgaaagaagccgatgaaacgttacgtaaaacaatccgtttagcaaatctattagacgtgccagttgttaatacattttctggcattgcaggatcagatgataccgctaaaaagcctaattggcctgttacaccttggccaacagcctactctgaaatttatgattatcagtggaatgaaaagttgataccatattggcaagatttagctgagtttgcaaaagagcaagatgtaaaaattgccatagagttgcatgcaggatttttagtgcatacaccatatacaatgttgaagttacgtgaggctacaaatgaatatatcggtgctaacttagatcctagtcatctatggtggcaaggtattgacccaattgctgcgattcgcatattaggccaagcaaatgcaattcatcacttccatgctaaagatacgtatattaatcaagaaaatgtaaatatgtatggtctaactgatatgcaaccatatggtaacgttgcgacaagagcatggacattccgtacagttggttatggacatagtccatatgtatgggcagatatcataagtcaacttattattaatggatatgattatgtattaagtattgaacatgaagatcctattatgtcagtagaagaaggtttccaaaaagcttgtcaaactttgaaatctgttaatatttacgacaagccagcagacatgtggtgggcataatacgaactcgaggttagtctgaagtttgtctgaagtaagactggtggcagtgttgaataaatgcatatgtcgccaagccattgccaaaaatttcacaccttaaatcaagtcattgtttgtaaagaaggtgtactttatataagtatatagcgatggtcatacccattcacagtaacaatcctcaccattgaaaagagtatataaccttttcaatagtgaggtatatgataataaaaaaagcctgttgtcacaatggtcatagacacgacatactttaaaggtttctgaatataatatttcagaatgcactttaaagatggacgtcgatgtagactaaagtgatgacaggctttcatctttttaaatattcattaatttctcttcttgtttaatacgtacatataagaaatacgcatacggtactaataaaatagttgtatatgttgcgtgtgttaataataatacaccgattaattcaggaatgatgtttaagaagtaatttgggtgttttgtaattttatataatccagatttaataataggatggttaggtaaaatgaataattttaatgtccaaataccacctaaagttttaataaccataaataacatgatataagcaaagattaatataactaagccaataccatttgcaaagctaaatgtatctttattaataaatgcctctacaccagccaatacataaattaaaacgtgtgttattgctaaaaacttcgaatttttaacgccatattcaactgcaccgtctgcttttaattgttttgagtgattaatagatatctttaagctgacaagtctgatacagaaaaagataagtaatatagatagaatcatgatgtcctccgtcattatgtcatatgtataagcgttgattttgacaacataaagtattttatagataaagcttgtcaaatactattaactatttattaattttagtacataaatatgtttctaagtatgtgtttatgttcagtattttggataatttaataattttaaggatattaagcgcttacaccgacgtgatatatttggcttaacgaaaatgattgaggtgacagagatgaacttttttgatatccataagattccgaacaaaggcattccattatcggtacaacgtaaattatggcttagaaacttcatgcaagctttcttcgtagtgttctttgtttatatggctatgtatttaattcgaaacaactttaaggcggcacaaccgtttttaaaagaggaaattggattatctacattagaacttggttatatcggattagcatttagtatcacgtacggtttaggaaaaacattacttggatattttgtcgatggacgtaacacaaaacgtattatctcgttcttacttatcttatctgcgattacagttttaattatgggatttgttttaagttactttggttctgtaatgggattattaattgtactttggggacttaacggggtgttccaatcagttggtggacctgcaagttattcaacgatttcaagatgggcgccaagaacgaaacgtggccgatacttaggattctggaatacatcacataatatcggtggtgccatagcaggtggtgttgcactttggggtgctaatgtattcttccatggaaatgttatagggatgttcattttcccatcggtgattgcattacttattggtatcgcaacattatttatcggaaaagatgatccggaagaattaggatggaatcgtgctgaagaaatttgggaagagccggtcgataaagaaaatattgattctcaaggtatgacgaaatgggagatctttaaaaaatatatcctgggaaatcctgttatatggattctatgtgtttcaaacgtctttgtatacattgtacgaatcggtattgataactgggcaccgttatatgtgtcagagcatttacactttagtaaaggcgatgcagttaatacgatattctactttgaaattggtgcattagttgcaagtttattatggggctacgtatcagacttattaaaaggtcgtcgtgcaattgtagctattggctgtatgtttatgattacatttgttgtcttattctacacaaatgctacaagtgtcatgatggttaacatttcattgtttgcattaggtgcgttaatctttggtccgcaattattaattggtgtatcattgactggttttgttcctaaaaatgccatcagtgtagcaaacggaatgacaggttcattcgcgtatctattcggtgactcaatggcgaaagttggtttggcggctattgctgatccaacacgtaacggtttaaacatctttggatatacattaagtggatggacagatgttttcatcgtcttctatgttgcattattcctaggcatgattctattaggaatcgttgctttctatgaagaaaagaaaattagaagtttaaaaatttaatataaatcggattaaaagtatcgccaatctattgcaatatagttggcaatcctgccccgacggcatgtgcgtgaagagatgaaagatactgcttctacccttgcaaatatatcatctctatgtctcggggcagatcataattccctgttatgaagtatccttatttgcccgacttagggtgactcaatgaatttactccttacaataaagacatatagcggtgtcaatattgtagggagtattgttttatatttaaactctctaaaaagcggactgaaagaaaagtgaaaacttctctatcagtccgctttttcatagaacaaaatggaggcgccataatcattagttatgtgctaatctattttgcttgcttacaataatcacttggcgacatttgtaaatattttttaaaatgatagctaaacattttatactctgaaaagcctactttgtctgcaatttcatagtgtttgtaatgtcgatctaacaattgcagagattgtaaaatacgatagcgatttaaataatcgacaattgtaataccaacatgatctttaaatgttcgcatcgcatacgattcactaacatcgatatgttgaattaaatctgaaacagtcactttcgtttgataagattgcttaatttgatccacaatctggtttacataataatcatcgtattctacttttaatagtggttggaaggcatcatgacaagatgctaagctacggccgttctgtgattgttgctctaataaggtacggacaagtcttcctaaaataacttctaattgtgcatggtctactggttttaataaataatcaagaacatgatgttgaatgccggctttcatatattcaaagtcatcgtaactcgataatatgatgacattacaatctagatgcgcaatatcattgagtaaatcgacgccatttttacgtggcatacgaatatcagtaattactaattctggctgatgttgttgaattagtgataatgcttcaacaccatctttagcagtgtatattgtattgaaatgatagtctccccaaggaatgatttgctttaatccttctcgaataattcgttcatcatcacaaataactaccttaaacatctacattcccccttgaaagtggtattttataacaaattaacgtaccttgattacgctttgaaaaaatatggagtcgtgcatgtgaaccatattgaatcattgctttattgtgtaaatgatttaatcccaaatgcttagtatcaaatacatcattattaagagattggcgtacatattgcaggcgagatgacgacatcccgataccattgtcgcaaactaaaacatgtaaattctgacgtgccaatgtcaggcgtatagtaatgtccaatgactcagtatctctaccatgtttaatagcattttctatgagtggctgaagcatcattttaccaattgtctggtgacgcgcttcttcagaactttcaatatggagcttaatcatgtcatcaaaacggatgttttgtattgcaacatactgttcaatgtagttcaactcttcgtttaattccactgtatgtgagtttgtacgtaatgagtaacgtaacatttgcgataattgttggaccacagtttgtgctaatttcggagataacgtaattaaatattgtattgtttgcatcgtattgaataggaaatgaggctggaattggcgttctatttcctttaactgaatatcacgcaagcgacgttctgtatgctcgatagaatggatcagttgctcatttgattcaaataaatcgtaaatataattattaatttcttctagttcactgttgttttttaaaggcgtatatgtacctagatgacgatttttggcatagtaaattttttgaataatcgtttcgatatcttttgtttgtcgtttagccatattatctgcgctaatgaaaccaaatattactagtaaaacaagaactacggccataacaattaacaacgtgataccatcttcaatgttttcatgtatatctttataaataatgagacgatggtcagcatggtttaattttacagattcattcataaatccgaattgttgtggtctatacttttcacctatagtaaaacggtcatcgttggcgtataaaatattgtcatattgatcaacgataagtgcgaattgtcggttatctttcttaatttcacttaaacgtggggtgttagccatataaattttaagcatatatgtactatttttgaatttaagctgatgcgttgaaaataaatacatatttttagtgtttaaatgttcataattattggttataaactgatttggtccagataattcataataaagtgttgcgggctgttggtgtattaattttaataattcacgttttgtagcggtcacatcatgatgatttgttaaatcgagctcttgaaacgaattattatgctgtgtaataaatgtctgaatctgcttttcagtatgatgtaaagatgactgactttcatcaacatgttgatgaatcgtacgatgctcaatccaaatatagatggcatagaagcttactagtccaataataatgactaaaaatactggaaaaatagtagacgcaaataacgatcgtcttaattgatgtctataaggtttgtatgccgtcattgaatcatctccaaaaatttatgatgtggaatatccggtaatttagatttcggtattaaaggtatgttcttaagattttcgatagactgatcgctttgttcactaacatcctttcgaattgacttggcatcgaactctgcaactaatcgttgttgtactgagcggcttgttaaatattgcactaactttttacgcttaggatgagggtgtgcatttttaactaaagcaataccatcaacatttaacattgttccttcaattggataaacgattgatacaggataacctttgtttttccatgtgcgtgcatcttgttcgtagcttagacctgcgtaatatttaccttttgcaacatcttcaatgactttagacgtctttgacagttgcatcgcatggttttggaattgatgcacatcacttactcgatgatgcatgctataaatagcacgcatatgttgatagcctgtcgttgttgtatttggatttgagtacgcaattttacctttaagtataggttgtaataaatcttgataacctcgaatcttaatatctccttgtaaatctgaattcactactataactgttggcattaatagaaaactagtaacatatttattgttcgagcgataatcctctaattgctgtgttacagatgtatcttgatagggaacaaaatcttctggatgatcaattgtttctgacaacacaccacccataaagacatcaccacgctccgaaaaatcttcgttatgcaagtttgaaagcagtacttgagtagatccgtgtttaatttcaattttgacatgctcttgtttttcaaattcatttaaaattggacgaatcaagtttgattgatacggagaataaactgttaatacatttttatcggattcagagtgacgcgtattagcgcatgctgataaaaaaatgagaaataatagcaagatataaatttttgatttcatgatatcccatcaattctatgtatattttaatacaataattttagcaataaatgacgcataagtaatgttaaatatttagaaatgtttatagatgacttgttaagacgttgcaaatgttgtgatagcacaaaatttttgtttgtcaagacgatttaccgaggctgtaaaatcaaactgttatattttatttgtagctgttatataaaaatcggcaagatattgaacggttcaaaagtgaatttttacgtcaataaaagtatttaatccagtctcttcatatataaaagtaaatctttctaagtgttgatttaacgcttatcaacaatcattttttataaacaaatatatactcctaaattaacttttaaagcaatgaaaatagtgaacattataactgttgtgtaacagaatgcaattagcatattactgttacacaaattagtacagtttctatgttttgacatacatttgatgaaaattgtacataatttatgtgaaaaaaatcacaacaaacatgctacaatgactatgaaaacgttaacatagcatttcaaattcacaacattatacagatggaggcgtttagtatgttagaaacaaataaaaatcatgcaacagcttggcaaggatttaaaaatggaagatggaacagacacgtagatgtaagagagtttatccaattaaactacactctttatgaaggtaatgattcatttttagcaggaccaacagaagcaacttctaaactttgggaacaagtaatgcagttatcgaaagaagaacgtgaacgtggcggcatgtgggatatggacacgaaagtagcttcaacaatcacatctcatgatgctggttatttagacaaagatttagaaacaattgtaggtgtacaaactgaaaagccattcaaacgttcaatgcaaccattcggtggtattcgtatggcgaaagcagcttgtgaagcttacggttacgaattagacgaagaaactgaaaaaatctttacagattatcgtaaaacacataaccaaggtgtattcgatgcatattctagagaaatgttgaactgccgtaaagcaggtgtaatcactggtttacctgatgcatacggacgtggacgtattatcggtgactatcgtcgtgtagctttatatggtgtagatttcttaatggaagaaaaaatgcacgacttcaacacgatgtctacagaaatgtcagaagatgtaattcgtttacgtgaagaattatcagaacaatatcgtgcattaaaagaattaaaagaacttggacaaaaatatggtttcgatttaagccgtccagcagaaaacttcaaagaagcagttcaatggttatacttagcataccttgctgcaattaaagaacaaaacggtgcagcaatgagtttaggtcgtacatcaacattcttagatatctatgctgaacgtgaccttaaagcaggcgttattactgaaagcgaagttcaagaaattattgaccacttcatcatgaaattacgtattgttaaatttgctcgtacacctgattacaatgaattattctctggagacccaacttgggtaactgaatctatcggtggtgtaggtattgacggacgtccacttgttacgaaaaactcattccgtttcttacactcattagataacttaggtccagctccagaaccaaacttaacagtattatggtcagtacgtttacctgacaacttcaaaacatactgtgcaaaaatgagtattaaaacaagttctatccaatatgaaaatgatgacattatgcgtgaaagctatggcgatgactatggtatcgcatgttgtgtatcagcgatgacaattggtaaacaaatgcaattcttcggtgcacgtgcgaacttagctaaaacattactttacgctatcaatggtggtaaagatgaaaaatctggtgcacaagttggtccaaacttcgaaggtattaacagcgaagtattagaatatgacgaagtattcaagaaatttgatcaaatgatggattggctagcaggtgtttacattaactcattaaatgttattcactacatgcacgataaatacagctatgaacgtattgaaatggcattacatgatacagaaattgtacgtacaatggcaacaggtatcgctggtttatcagtagcagctgactcattatctgcaattaaatatgcacaagttaaaccaattcgtaacgaagaaggtcttgtagtagactttgaaatcgaaggcgacttccctaaatacggtaacaatgacgaccgtgtagatgatattgcagttgatttagtagaacgcttcatgactaaattacgtagtcataaaacatatcgtgattcagaacatacaatgagtgtattaacaattacttcaaacgttgtatacggtaagaaaactggtaacacaccagacggacgtaaagctggcgaaccatttgctccaggtgcaaacccaatgcatggccgtgaccaaaaaggtgcattatcttcattaagttctgtagctaagatcccttacgattgctgtaaagatggtatttcaaatacattcagtatcgtaccaaaatcattaggtaaagaaccagaagatcaaaaccgtaacttaactagtatgttagatggttacgcaatgcaatgtggtcaccacttaaatattaacgtatttaaccgtgaaacattaatagatgcaatggaacatccagaagaatatccacagttaacaatccgtgtatctggttacgctgttaacttcattaaattaacacgtgaacaacaattagatgtaatttctcgtacattccatgaaagtatgtaacaaaatttaaggtgggagcactatgcttaagggacacttacattctgtcgaaagtttaggtactgtcgatggaccgggattaagatatatattatttacacaaggatgcttacttagatgcttgtattgccacaatccagatacttggaaaattagtgagccatcaagagaagtcacagttgatgaaatggtgaatgaaatattaccatacaaaccatactttgatgcatcgggtggcggtgtaacagtcagtggtggcgaaccattgttacaaatgccattcttagaaaaattatttgcagaattaaaagaaaatggtgtgcacacttgcttagacacatcggctggatgtgctaatgatacaaaagcatttcaaaggcattttgaagaattacaaaaacatacagacttgatattattagatataaaacatattgataatgacaaacatattagattgacaggaaagcctaatacacacatccttaacttcgcgcgcaaactgtcagatatgaaacaacctgtatggattcgacatgtccttgtgcctggttattctgatgataaagacgatttaattaaactaggggaatttattaattctcttgataacgtcgaaaagtttgaaattctgccatatcatcagttaggtgttcataagtggaaaacattgggcattgcatatgaattagaagatgtcgaagcgcccgatgatgaagctgttaaagcagcctaccgttatgttaacttcaaagggaaaattcccgttgaattataaatacaattcagaccgaaaagaaagcatatgcaacttcaagagtgaaggggcatatgcttctttttcaattgagtattgagtattagcaagacgtagtaagtatatgagacaacttctacaatggttgaaggaagacgtttttgtaagtagctatgctgataaagaatgtgatgtcttgttaaaggtggggttccaatatcatcatttagctgatgttgaatgggttattatttgctacttgcatatgaatatgagtcttttcaaatttttattgaccctgagtaatgaaaaatattaagatgaaacttaatattaaagcaatgcggagcgtgattatgaagagaattagtaaagatatatgggcagtatttaaattactgtatcaaaataaagggcgttttagcattaatgccttactattgcagttaatcatgatttttattagtagtacatacttaattttactatttaatatgatgttaaaagtagctgggcaaagccaacttacgattaacaattggacggaaatcgttagtcatcccgccagtgtgatacttcttattatattcatattaagtgttgcctttctgatttatgtagagttttcattgttagtttatatggtttatgccggctttgatcgacagattattacatttaaatccatttttaaaaatgcctttgtaaatgtgcgtaaactcataggtgtaccagttattttctttgtcatttatttaatgttaatgatacccattgccaacctaggactaagttcagtattaacaaaaaatatttacatacctaaatttttaacggaagaacttatgaaaacgacgaaaggtataatcatttacggtacctttatgattgctgtatttatattaaattttaaattaatatttactctaccgttaacgattttaaaccgccagtcgttatttaaaaatatgagactaagttggcaaattacgaagcgaaataagtttcggcttgttatagaaatagttatattagaactcatcattggtgcgattttaacattaattatttcaggagcaacatatcttgctatttgtgtagatgaagaaggagataagtttttagtctcatcaattttatttgttgtattgaaaagcgcattgttcttctattatttatttacgaaattatcattaatcagtgtgttagtactgcacttaaaacaagagaatgtattagaccaaccgggcttagaatttaaatatccaaaaccgaaacggaagtctaggttctttataatttcaatggtgcttgcagtgacatgttttatcggttataacatgtacttactttacaataatactatcaatacaaatatctccattattggccatcgtggtttcgaagataaaggtgttgaaaattctattccgtcattgaaagctgctgcaaaagcgaatgtcgaatacgttgagttagatacaattatgacgaaagataaacaatttgttgttagtcatgataacaatttgaaacgtttaacaggtgttaataaaaatatttctgaatctaatttcaaagatatcgtcggtttgaaaatgcgtcaaaatggacatgaagcaaaatttgtatccttagacgaatttattgaaacggctaaacaatcaaatgtgaagctactagtagagttaaagccacatggtaaagaaccagcagattatacacaacgtgttattgatattttgaaaaagcatggtgttgaacatcaatatcgtgtgatgtctttggattatgatgtgatgactaagttgaaaaaagaagcgccatatctcaagtgtggttatatcattccgttgcagtttggtcattttaaagaaacatcattagatttctttgtcatcgaagatttttcttattcgccaagacttgttaatcaagcgcacttggaaaataaagaagtctatacttggactattaacggcgaagaagatttaacgaaatacttacaaaccaatgttgatggtattatcacagatgacccagcattagctgatcagattaaagaagaaaagaaagacgaaacatacttcgatcgttctataagaattttgtttgaataatataaacaaagacctctaaagttatcaagatgataccttcagaggtctttttaatgttgccatctatgggataggcaatcgtttcattcgtttatattcatatgacaagtatttgtatggcaatttggcgtcacaaacacttacatgatttattggtgaattattaattgttttgtgaatgcaaagggttagaaattgaattgtaaatactttctaatctttgtttcgctttagtcatttgatccaaatttttagtgcgtatagcggattttgcaatatagtgcgcagctaaaatatcgcgtttttgaaacgcatctaaatttaggtacgataatttatttaagtcagtgtttgctattaattcatgtaattgatctacaagcgcttgatgttgatacgtatgtgatgtagtttcagatttgcttgctaatttaataccagtcgtatcaaggagcgccgctttaataccagcaactaaatatgttttgattttcatttgtgttgtcatgctttgttactcctttgatgtacattaatcaaaaaaattatacactattgtatattgcaaagctaattaactataacaaaaagatagttaatgctttgtttattctagttaatatatagttaatgtcttttaatattttgtttctttaatgtagattgggcaattacattttggaggaattaaaaaattatgaaaaagcaaataatttcgctaggcgcattagcagttgcatctagcttatttacatgggataacaaagcagatgcgatagtaacaaaggattatagtgggaaatcacaagttaatgctgggagtaaaaatgggacattaatagatagcagatatttaaattcagctctatattatttggaagactatataatttatgctataggattaactaataaatatgaatatggagataatatttataaagaagctaaagataggttgttggaaaaggtattaagggaagatcaatatcttttggagagaaagaaatctcaatatgaagattataaacaatggtatgcaaattataaaaaagaaaatcctcgtacagatttaaaaatggctaattttcataaatataatttagaagaactttcgatgaaagaatacaatgaactacaggatgcattaaagagagcactggatgattttcacagagaagttaaagatattaaggataagaattcagacttgaaaacttttaatgcagcagaagaagataaagcaactaaggaagtatacgatctcgtatctgaaattgatacattagttgtatcatattatggtgataaggattatggggagcacgcgaaagagttacgagcaaaactggacttaatccttggagatacagacaatccacataaaattacaaatgaacgtattaaaaaagaaatgattgatgacttaaattcaattattgatgatttctttatggaaactaaacaaaatagaccgaaatctataacgaaatataatcctacaacacataactataaaacaaatagtgataataaacctaattttgataaattagttgaagaaacgaaaaaagcagttaaagaagcagatgattcttggaaaaagaaaactgtcaaaaaatacggagaaactgaaacaaaatcgccagtagtaaaagaagagaagaaagttgaagaacctcaagcacctaaagttgataaccaacaagaggttaaaactacggctggtaaagctgaagaaacaacacaaccagttgcacaaccattagttaaaattccacagggcacaattacaggtgaaattgtaaaaggtccggaatatccaacgatggaaaataaaacggtacaaggtgaaatcgttcaaggtcccgattttctaacaatggaacaaagcggcccatcattaagcaataattatacaaacccaccgttaacgaaccctattttagaaggtcttgaaggtagctcatctaaacttgaaataaaaccacaaggtactgaatcaacgttaaaaggtactcaaggagaatcaagtgatattgaagttaaacctcaagcaactgaaacaacagaagcttctcaatatggtccgagaccgcaatttaacaaaacacctaaatatgttaaatatagagatgctggtacaggtatccgtgaatacaacgatggaacatttggatatgaagcgagaccaagattcaataagccatcagaaacaaatgcatataacgtaacaacacatgcaaatggtcaagtatcatacggagctcgtccgacatacaagaagccaagcgaaacgaatgcatacaatgtaacaacacatgcaaacggccaagtatcatacggagctcgtccgacacaaaacaagccaagcaaaacaaacgcatataacgtaacaacacatggaaacggccaagtatcatatggcgctcgcccaacacaaaacaagccaagcaaaacaaatgcatacaacgtaacaacacatgcaaacggtcaagtgtcatacggagctcgcccgacatacaagaagccaagtaaaacaaatgcatacaatgtaacaacacatgcagatggtactgcgacatatgggcctagagtaacaaaataagtttgtaactctatccaaagacatacagtcaatacaaaacattacgtatctttacaacagtaatcatgcattctatgatgcttctaactgaattaaagcatcgaacaatcggaagcatatttctaaattatttattcattatagtcttaaacataacatgacctaatatattactaacctattaaaataaaccacgcacatctaagtgatatacgacaatcacagcaataataattgctttagaaagtcgtgccgaactggaacttacaagtctagttcgaacacacactgatgtgagtggttttctttattttaaacatgaacaatcagataagttactagcattagcaaatattattaaatcaaagggcttcgattcataaaatttaaaacaatgattaaaattagacgtgtaaatgttaaattctaaaacggaaataaccaccatcccattaaaccactttttttgttcaatcactatatttcacacagcttcattaataaaacgaaattgcttcaacccgcttcaacttcaactggcttcaacttcagcctacttcattcaataacaaaacgaatccgcttcatccaaaatcaaccattctaacgcacatattcaaatatagcagctgcacccatgccgacaccaatacacatcgtaaccatgccgtaacggctatcgggacgtctacccatttcattaagtaaacgcgcggttaacattgcgcctgtagcacctaatggatgacctaaagcaatagcgccaccattcacattcgtacgtgatatatctagacctacttctttaatagatgcaatcgtttgagaagcaaatgcttcgttcaattcgatcaaatcaatgtcttcaacagatagattgctgagtgacaatacttcaggaatcgcatatgcaggcccaatacccataattttcgggtcaacgcctactgccttaaaaccaacgaatcgtgcaataggtgtcacgccgagttctttcactttatctccagacattaaaactacaaatcctgcaccatcagaaagtggggcagatgttcctgcagtcatagtgccgtcagctttaaatactgtacgtaatttggctaatgcctccatcgtggtgtcagggcgtataaattcatcttggtcaaagatatttgtgtgtacttttggtcctgcgtttgtatattcaactgagtttacttgtattggaataatttcatctttgaaccgaccatcacgttgtgcgtcataggcacgttgatgacttctgacagcataagcatcttgatcttcgcgtgatacgtcaaattgggatgctacattttcagcagttaaacccataggatatgacgcacctatatcatcatattgtaaggttggattgtttgtgggctcgttgccacccattggtacggcactcatcaattcaacgccaccagctacaagtatatctccttgaccagccataatttgattggctgcaatcgcgatggtttgtaatcctgatgagcagtagcgattcactgtttgacccggtaccgtgtcagataatcccgcacgcaatgcaatcgttcgtgcaatgttttggccttgtaatccttctggaaaagccgtaccaacaatgacatcttcaatcatattcttattgaattttccgtcaatacgtttcaatacgccttgtaatactttggctgcgacatcatcaggtctttcgtggaataatgcgccttgctttgctttcgctgcggctgaacgcccataagctacaatgtatgcttcttgcatggttatcatcctctcttaatgactatcttttaattacgtaatggcttaccagtttttaacatatgtgcaattctttcatatgattttttagattttagtaagtcaataaagccaattttctccaacgattgaatgtaacgttgattgataaatgtatttcttggtaaatcaccacccgctaaaattgtggcgatatttaaggcaatatgataatcatggtcgctaataaaatgaccccgtctttgcgcatctaattgtccttggatcaatgctttgaagtcttcacctaaagcgatatattgatgtctaggattcggaatatagtttgtttctgcttcatatttcgcacgtttgagcgcaacttcgacacgttgtgctgtattgaaaataatcgtatctgtatcacgtaaataaccataacgacgtgcctcaaaggcatttgtagagactttcgcaaatgcgatattcgtcagtacttttgtcatggaagcttgtttgtcatcaaacttatgcgatgtgcgtaatatgcgatcagccatttctgcaaggccaccgccactcggtaataagccaacacctgcttcaacaagaccgatatatgtttcacttgcagcgacaacaataggtgagtaaagtacaagctcacagccaccgcctaaggcacgaccttgaacagctgtgactactggtttcaaactatacttcaaacgattaaagctataatgtaatttatcaattgattgtgcaacgacatcatctacaagaccgtcttcatgcgcctttttcattaagaaaaggttagcacccacactgaaattgttaccatctgcataaataaccatacttgtgtaatggtcattttccagtaaatcaatcgcatcaactaacgcatcgttgaattcatcggtaatgacattatttttactttgtaatttcagtaacagttgatcatcatgagttacggaaagtttggcatcacctttatcccaaagttcatcttttacgaagtgagaaataggtgttgcatattcaatggtctcatcttgtttataaaagccaccatctaaatcactaatccattgtggtaagtctccaagttcgtcttccatacgtgttttaacacgttcgtatcccattgcatcccataattggaatggaccaagtttccagttgaacccccagacaagcgcacggtctatgtctcggaaatcatcggtagctttaggtacattgatagcagagtaatagaaattattacgtaatgtctcccataaaaatagtcccgcttcgtcttgcgcattgaatatggtatcaaggttatgcactaagtctttattaaattcatttaaaattggtaattgtggttgcgatacaggtacataatcttgtttttcaacatcgtaaacaagtcgagctttagtttctttatcctttttgtaaaatccttgtttcgttttacgtccgagtgcgccattgtcaaacaacgtatttacaattttgacatcatgaaaataaggtgtttcttcaggtacttgttgcatgcctttaattacagacactgcaatatctaaaccgactaggtcagatagcgcatatgtacctgttttaggacgaccaatcgcttgcccagttaaagcatccacatctacaatgcttatcttgtgttgctcggcgcgatacataatatcattcattgtttgcgtgccgactctatttgcgacaaagccaggcacatcattgacgacaatgacacctttacctaacacattttgcgcgaaattttttacatctaatataatagattccttcgtgtgtgacgtaggtattaactccactaatttcataatacgtggtgggttaaagaaatgtagaccaaagaatcgttcttgatccttctcgttaaatgcttgagcaatcgcattaattggaatacctgatgtatttgtagcgaataaagcatcttctttagcatgttgtagaacttgttgccaaacagcatgcttaatttcaatatcttctttgactgcttcgatatataaatcagcatcatcatttaccaagtcatcatcaaaattaccatatgttaaatgactcgctagatttaagtcgaatagtagcggccgtttcttatctgtaattttatcgtaagattttttcgcaatgagatttggatcgtttttgtccactacaatatctaatagttttactttaagtccagcattcacaaaaagtgctgccagttgagcgcccattgtgcctgcgccaagaacggttactttattaattgtcatagtgattcctccaatttagttgaggataagataaccattaagataattggaataacgttgctattttataaaattaattaagtatctttgacagtcatcttagcctcttatttaaggaaaaagctttatgcttaaaataagtcttttttagtgaaattaatgcatctcatataattatttgctatttatacgaaagcagaatctccagtcaaagcgcgtccaattactaaggcattaatttcatgtgtaccttcgtacgtgtaaatcgcttctgcatcagagaagaaacgtgcaatatcataatcgtcagctagtatgccattaccacctgtaataccgcggcccatagctactgtctcacgcaaacgtaaggcattcatcatcttcgccgttgaagttgcaacctcgtcatattcaccatgtgcttgcatattagctaattgagcacatgttgccattgcttgagctaaattaccttgcatcattgctagcttttcttgtattaactgatatttactaattggtttgccgaattgcttacgctcagtgacataatctaatgtggcacgtaaagcgccagccataccacctgtagccatataagcaacgcctgctctcgttgaataaagaattttggcaatatctttaaagcttgttatgttttgtaagcgatccgcttcatctactttgacattagttaatttaattagggcgttaggaacaatgcgaagtgcgattttattatcaatgacttcaatatcgacgccatcttgttctggtctgactacaaagcaatggggtttgccagtttctttatttactgcgaatactggaatgacatcagatacatgtgcaccaccaatccatttcttttcaccattgataacccaagtatcgccttggcgttcagcgactgtttcaagacctcccgcaacgtccgaaccgtgttctggttcagttaaagcaaagcatgtacgcagttcatgtgactgtaatttaggtacatatttcgcaatttgttctttgctacctccgaaatagaaagtgttatgccctaaaccttggtgaacaccgagtagggtagctaaggaaatatcaaatcgcgcgagtaggtaagacatgaaaaactgaaatagttgactaggcattttggcgtttggacgatccttgtaaagtaatggattgttaaaataatttaattctcccagatctttaaaatagtcctcgggtacagtagcgtctatccaatgttgattaatattttcacggtacttactttctagcaatgaatctacttgttgtaaaaattcgacttcaccgtctgttaaacctttagcaatactaagtacatcttcaggaaataatgtttttaagaccgtttctttttcaaatgtcatataaattcctcctaaaaataatatgaatactaatgtgaaatgcatttaattcaaaaacaacacgctttatttgtaaacgcttacactaaatgtcaaaaatttttatcacctttaaagtgtttgcgagactttgtcattcatcatttgtcgaatcgcaagtttatctggtttctgcgtactgtttaacggcatatgtgtcactggtacatacattcttgggactttataacctgctaaacgacttcgcatatgttgatttaaaatttcagcgtaatgaggttcatcttcgcgaagtataatggctgcagcaattgattcaccatattttggatgatcatagccaacgaccacacaccggtctactagtggatgctcagctaaagcattttcgacttcggatggtaagacattttcgccaccagttatgattaattcttttttgcggtcaataataaatatatcgccatcgttgtccatcttcgctaagtcaccagttaataaatatcgaccatgaaatgctttggcagtctctgctggtttattccaatatcctggcgtgacatttttagccttaattgcaagttcgccaatctcaccagtaggtacttcctcaccgttatcatcaaggatacgtgcatcaacgaacatgactgctttaccaatactcattggcttacgttttgaattttccggtgtattaacaagtacaagaggtgcttcagttaaaccatagccgttaataatgtttatgccatattgtttaaaagctgcttggatacttggtaatggttgtgaaccaccttggatgatataatccatagctctaaaattttcaggattaaaattactagcacgtagcgtactataatacattgtcggaatcatgataataaatgtagggtgatattgtgcaatcatgtcattcaattcttcgccgttaaagtaacgttgaagaataagtgtgccacctgacattaatactggtaatacagtatcgttaaaccctaaaacatggaacattggtgttgatacaatcgtaatatagtttgaattgaacttatacgtcagctctaagtttgcaccgttatgaacaaatgattcatatgagaacatcacacctttaggtgatccggttgtaccacttgtataaattaatgctgcaagatcttgtggttcaacaggtgttgcttgaaaaggttggtgataatctggatttacgatttcatcatattgcgccacatcaatatccatatgcaataagttttggtcaatatcggtgagtgaacttaaatgtttttcagcatagaagagcagttttaattgtgcatcttccacaatggctgcaatttcttttgggttaagccgccaattcaatggtaaaaaaaccgcacctgttttaaaacaagcaaacaataaatctaatattgcaatatcatttggcgcaaaaataccgataacatcgccttttttaacaccttgagatgttaaataatgtgccatattatcagcgcgtgcattgagttgttggtatgtccaagatgtttgttttgcgtgatcaataacggcaggcttgtcatcatcgaagtctgaacgcgtttttatccaatcgaaattcattagtataccccctttagcttcactttcatactttatgaattgattgtttaagttgtccccatttttctttgtaaatgctggtatcaattaattttaaatgatcagcaataattggtttaaaagccatttgattcaaaatatctttatgcaaatcaagacctggtgcaatttcaattagtttcaagccttgattggtgagttcgaatactgcacgatcagtaacaaaatagatttcttgctcgagtgattgtgaatattgtgcattaaagtcgatatggctcacatctgatacaaatttctggttttgtccttcagtttcaatgtttaatcgttgattatggcatgagacatgactgccagctacaaaagtacctgaaaagataattttatttacagattgcgtaatgtctataaagccaccacatccatttagtcggtcattgaagtaagacacgttgacattgccgtattgatcaacctcagcaaagctaagataggcaactgatacaccattgttataaataaaatcccatgctcgatcatgaggcatgcgcacatctgcattgtaattcataccaaaatgttcacgactcccaacgaatccaccgaaaatgccaacatctaaaatcggttgcacatcatgttcaacacattcttcatgcaataaattagagagttcattattgatgccataaccgatgctaattgtatcgccataagttaaaaactgagcagcacgtcggagaatcaatttgcgactattaaaaggtaatgcgggttcaggtattccatcaattcgttcttctccagacaaggctggtaaataatgactttgaattacttggcggtgattcttttcatcttctgtgacgtatacataatcgacaagatttcctgggataacaacttcattcggttttagttgatagtcgtcaactaaagctttaacttgtacaataactttcccatgattggctttcgcgtttaatgcgacatgataacactcgctcaagtacgcttcttgagttaaataaatgttaccttgttgatctgcgtatgttcctctcagtagtgccacatcaacgctagggaatgtgtaatgtaagtatgtttcatcgttgatggttactaatgaaactaaatcatccgttgttcgtgtatttactttaccgccaccgtatctaggatcaacagctgtgtttaatccgattttagtaataactccaggtaataattgattactctgacgataatgagttgcaatgataccttgtggtaaaaaataagcttcaatgtcattatttttcattgcttgtgccgttttggaagaagccgttaaaatactcataatgacacgtttaatcatgcgacgttctataaaatcatctaaatccggtgcggcacctaaactatgaatatcattcgctaatataaacgttaaatcattgggcgtatgatatgtgtcatgttgcgctaacacagcacgtagaacttcggcgggtaagttggctacagctaatgctggtaaaccaatcacatcaccatctttaatgatatgttgtaagtcgtgccatgtgatttgtttcaagcaagtcacctccatcacatttgataaaatatagcgtttttacactttgtgtaaacccttacaagaaatataacataacgacgtttaaaatcaattagaaatatctttttattctgataatagacacagtatagacacattttgatggtcgataacaattgtaatatcaagggtttgtaatgaattgaatatcattaaaatacttatataaaaatattgttcggaatataaaaagttaaataggttttgatttttaaatatgaaatacaaagtgcccaatcgaacaaagtatttatattaaaatatggaaaatccatcaatattaaattaaaatagttttattatgaaaagtgaaagtaggtaagtctatggaaggtcttaatcatcgaagaaatacagaaaaagaagagacaacacaaacgcaatcagttgcacctaatacaggtgaagaggggatgtcatcagcaagtacacaatcaactaagacgtccgacatacataatgaatctatcgataaacaaatggaagctaaagcgcatgaaacagcgcaaaatacagatttaaaaaacgaagcaagaagtttatttgataatgcaaccaaatcaatcggtagactagcgggcaatgatgaaagcttaaatcttaatttaaaagatatgctttctgaagtatttaagccgcatactaaaaacgaagcagatgaaatatttatagcgggtactgctaaaactacgccagcaatttgtgacatatcagaagaatgggggaagccatggctcttttctcgagtattcatcgctttcacagtaacatttattggattatgggtcatggcagcaatttttaataacactaacgcgattccgggtctcatttttataggggctttaacagtaccattatcgggtttgttcttcttttatgaatcaaatgcgtttaaaaatattagcatttttgaagttattatcatgttctttattggcggcgtattttcattactaagtacgatggtattatatagatttgtcgtttttagtgatcaattcgaaaggtttggttctttaacatttttcgatgcatttttagtaggattagttgaagaaactggaaaagcactcattattgtttatttcgtcaataaattgaaaacaaataagattttgaatggattattaatcggtgctgctattggtgcagggttcgcagtttttgaatcagcaggttatattttgaatttcgctttaggagaaaatgtcccattattagatattgtcttcacacgtgcgtggactgcgattggtggtcatttagtttggtcagcgattgttggtgctgcaatagttattgcgaaagaacagcatggctttgaattcaaagatatttttgataaacgctttttaatattctttttatcagccgttgttttacatggcatttgggatacatctttaactgtacttggcagtgatacgttgaaaatatttattttaatcgttattgtgtggatacttgtattcattttaatgggggcaggtttaaaacaagtgaatttactgcagaaagaatttaaagaacaacagaaaaaagtagacgaataataattaaagcttatgttgctcatatgtttgtgacataagctatttttataatttgtctttaaaagagtggaataggaatactttttggagttaaaaaagtgtttcacgttaaacaaatagtgacaattagatttatataaaatgaacatgattcactgaaagtatgtaataatcattttattgaaattcatcaaacagaaattaatacaatcatataagcaaattaaaccacgccataatcatattggatgacttcggcgtggtttttatagttgaagcagggctgagacataaatcaatgtcccacactcccttatcgttcaatcgttgttcgataatcgattaaatagataccttcaggtgttactttataatttttaaccttagagttagcagcgactatttgatcgttgtaagcaatataactgtttggtacatctcgacttgataatttaataatatcattagaaatattgtgacgttccttaacatctacagtatgattcaattgattaattaaatcatcgacgttgctattattgtagtctcctttattaatagcaccatcttttttatatgcttgattaaagaaataacctgtatctccacgaggaattgttccgaaactatacatcgttgcatcccatgcagaacggtcttttaagtaaccttctatgtcatcaacacttttaatgtcgatttcaatatttgcttttttagcatctgattgtaatacttgcgcaattttcgatagctctggacgaccgtcatacgtaattaacttaatttttaaagggtgttcttttgtataaccatctttagctaataacatttttgcttgttcgatattttgtttggttaacttaggttctttaatatatggaattttatcattaaatggactcgttgcaggtttcgcataaccttgataaatatgatctgcaataccttgtctatcaatgatatgatctaatgcttcacgaacggatttagtcatttttttattagtatgattatacataagtaaagaagttctaaatccagattcttttgacacttttaaattttgattattttctatgtcttgaactttattaactgggacatcagttattaaatcatctttttgagattctaaatttctgacgcgattattgccgtcttcttggtacgtcacagtaatatgatcaagtttcggtttaccttgccaatagtccttaaaattcgacaatgatatttttcgagattgcttataatcttttatttggtaagggcctgtaccaacaggagtttgattaacatctgatttagcatctgtatcataaattgccataaaaggattagctaattcagatacaagttcagggtaagcggagttggttttaattgtcagtttttgacctttagcggtaattgatgatattggtaatgaatatttgaccaagtcgctttttttcatgctattttcaaggctagatttcactttttctgcagtcaatttttgaccgttttgaaatttaatattatcttttaattctatatctaacgttgtatcatttggttgatgatacgatttcactaatgctttttctatttttccttgatcatttgttttaaataatgattctgcagcaccaatcttaactggtacatctgtttcataaggtgcaatagactttgtttttaacggtaacgaaatatttaagtctttgccagatgaatgcattgagccacatcctgataacactaatactgctgaaaatatagttgctagtcttttaaacttcatttcattaacactctctttctaattactatgtaaaacccaacaattaatattttaaaactttattttgttaaagtaaaatgttgttcaagtttagtaattattaaagttcaattaattgtagtaattatgctttttaaaaataaatattagaaatgaagttagcgacatttatagtgattcacgataaacatatataactaagtattgagcaactgctgtagtactacagcttggttatgtttagtatcttttgctgcatataacaatagaacatgattatgctgatttacaatatcctttaatttttcaaaagcatctttttgcgcatcctgatcacgtaattctttttcatatttttctttaaaagctccaaaaagtttaggatcatgttggaaccattgtcgcaactcagtagaaggggcaatgtcttttaaccaataatctaggttagcagttcttttcgaaatacctctcggccagactctatcgactaggatacgaatagcgtcggtattatctttattgtcataaatccgtccaatatctacggtcatcttgtgaactcctttcttatgaaattcagtgagcatacatcaatgcatgttgtggtgggacgaccaaataaattttgcgaaaatatcatctctgtcctactcccaattaaaaaacagccatgacaaagtaaagtcatagctgttttggtatagatgtcatttatttttacgtttagttaaatacttcaaaccaactgcaaagaccgtgtacccggctatggtttgtatcaatgttttaattaaattattatttttaacaataatatttgcagtaacaatacttacgaaatataatgcaaatacttttacgtaacgttgattaagtttcatatgagcactaaacctcttttctcagttatactgcaacgcttagtcttggaataaatgtttcgtagtgtacgcgatccatatcgtaatttaaagatttaagtgcttcgatcatagattgtaagaattttgtaccaccacagatataaatttcaggtttatttgctaaaaatacttgtaattcttcagcaccaatatagccttgtttatcttttaagtgtgtatataatttagcgttgtcatgatggcttgcgatactgttgaagttgtctttgaaaggtaaatgttgttcattttcagcaacttgaaccatctgtgtatctaaacctttggcagaggcagcttcatacatagctactaaaggtgtaacaccaatacctgaacctaagaaaagttgtggttcagtcgtattctctaatacgaatccacctacaggcgcagctaaattaatcatatcgccttctttaatctcatcgtgtaaaattgttgaaacttcgccttcatgttctgttgtgacatcacgtttaacgccaaaagttaaatggtttttttcacctgatacgatagaatagtgacgtttagctctatatggaagtttatcactagaaacatcaactgtgatgtattggcctggtgtaaattcactaaagtcatattcttcagtttcaactgtaaatgatttaatgtcttcagattcttgtttaatattggtaattttgaatggtttaaaaccaatccacatcatttgatcataaatttctttttcaatttggatgaacacatccgcaataacgccatatgcttttgcccaagcttgaatgacagggtcattttcttctaatcctgtcacgtcttgaatggcttttaataaatttttccccacaattggataatgttcagcataaacttgtagtgcgcagtgtttatatgcgactggcataatgactggtttaataacacttaagttatcgatattaaccgctgcggccattacagcttgtgctaatgctgaagattgcatgcctcgtttttggttcgtttgattaaacatgtttaaaagttcaggatgcgctttaaacatttttggataaaagattgacgtaatttctgtccctttctctttaagtaaaggcaccgtttgtttgataatgtctttctcttgttctgtaagcatgatactcctcctttaatctgtatattttgattattctactaaaaatttcgatattcaattaattggtttgagaaaatataaataaaatggcaaatttgataattgtatgacatttttaattttttaaatacttatcaataagcattgtgtacaattgtctgtttgcacaccgacgattgagcgcatttatttgactaattcaaaaaacattgttgttttcctagaaaaaagtaaacatgataataaaaatgtgaaagtgtaaataatcactggcgaagtacgaagactaaagacatctaagatgtaatcgtatacaaattaaaaaggtgtaaaaattaaaataaaatgtgaaataaatcacaatttaatattgacccagtacttaatgcatgttacattttatatgtgaaataaatcacaaacttaaaagcggatgacacatgaccttttaagttatgcgttgaaaataaaagagatgtttatttgcttttgtatcgtcaataagcagcattaaactaacatatttgaagctacatgtatgttagtgaattaatcataagggagtttttgtaatgaacaaatttaaagggaacaaagttgtattaataggtaatggtgcagtaggttcaagctacgcattttcattagtgaaccaaagcattgttgatgaattagtcatcattgatttagacactgaaaaagttcgaggagatgttatggatttaaaacatgccacaccatattctccaacaacagttcgtgtgaaagctggcgaatacagtgattgtcatgatgcggatctagttgtcatctgtgctggtgctgcacaaaaacctggagaaacacgtttagatttagtatctaaaaacttgaaaatattcaaatcaattgttggtgaagtaatggcatcaaaatttgatggtattttcttggtagctacaaatcctgttgatattttagcgtatgcaacatggaaattctctggtttacctaaagaacgtgttataggttctggtacaattttagactctgcacgctttagattattgttaagcgaagcgttcgatgttgcgccacgtagcgtcgatgctcaaattattggtgaacatggtgacactgaattaccagtatggtcacacgctaatattgcgggtcaacctttgaagacattacttgaacaacgtcctgagggcaaagcgcaaattgaacaaatttttgttcaaacacgtgatgcagcatatgacattattcaagctaaaggtgccacttattatggtgttgcaatgggattagctagaattactgaagcgattttcagaaatgaagatgccgtattgactgtatcagcattattagaaggcgaatatgaggaagaagatgtttatattggtgttccagcagtcatcaatagaaacggtattcgcaacgtcgtagaaatcccattaaacgacgaagaacaaagcaagttcgcacattcagctaaaacattaaaagatattatggctgaagcagaagaacttaaataactttttataaaatctataccatcccaaaaattgtaaaaccttacccaaaaaattgtataaagggctatttgatacaactatatgtgtcgagtggccctatttttaatgtagtgaaagtcgttgttgaaattaaattcaaatctggcacttaagctttaatcatagcattaagatgattgtctagcagaggcgatttgcgggctcactacagtgcatgatgaacttaatgcttcaaatgtaacattaaaaataaaagcaacgatgtcacttcttacttcgtacatcgttgccattagttctgttgatatttcggttagtcttaatccccgagcaattcttcaatttcatttttgataactgtaacgtgaggcccataaattacttgcacaccagtgccttgctggattacacctttggcaccagtactttcgagtaatactttatcgactttgtcattttgatgaagtgtgacgcgtagtctcgttgcacaacagtcaacgatttcaatgttatctttgcctcccaaaccagcaacaatagtttgtgctctttcagtagcctcaacttgttgtgctgcagctttatcttctcgaccaggtgttttgaaattaaatttcgtaattaagaatctgaaaacgatgtaatacaaacagaaccacacaattccaataggtatgacgtataggtagtttgttttactattaccttgtagcacaccaaagagtaagaaatcgataaagcctccactgaaggtttgaccaattgtaatgttgaaaatgtctgccatcataaatgctaatccatcaaagaaggcatggattacataaagaataggtgcgacaaacaagaaactaaactctaaaggttcggtaatacctgttaaaaatgaagtgagtgcagcggataacattaaaccgccgacaacttttttatgttcaggtttagctgtgtgataaattgcaagtgcggcaccacataagccgaacatcatcgtaataaaacggcctgacataaagcgtgacacacctgaataatacttcgtcacatctggatcaccaagttgagcaaagaagatgttctgcgtaccttgaactaagtgccctttgacttctaaagtaccaccaagtgccgtctgccaaaacggtaagtaaaaaatatggtgtaaaccgagtggacctaacaatcttaagatgaagccataaacaaaagtaccgatggcacctgttttcgttacaaatccaccaacatgataaatgccggcttgtatgcttggccaaatgaaaaacatcaatacacctaaaaagattgcggcaaatgctgtgacaatagggacaaatctagagccaccaaagaaacctaaatacggtggtaataccactttgtgatatttgttgtgaagtattgcggtcataatacctgtgataatcccgccaaaaacaccggtttcaaccgtttgtataccgagcaccatgccttgtccattttgtgcaagctgatcttttgccaatgtgcccgtgatagttaataagccattcatagttgcgttcataattaagaaaccgagcagcgcagctaaacctgcagtacctttatcgcttctagataatccgattgcgacaccaattgcaaagatgaccggtaaattttggaaaacaatactacctgcagctgacattaatgtaaaaatattttgtaataaggtaatatctaaaatagggtatgctttaacggtgtttggattacttaatgcaccaccgatacccaacaatagacctgcagctggtaagattgcgataggtaacataaaggacttgccgaactgctgtgctttttcaaataaagatttcatcaacatccctcctaattattctcaatatagcttttgagaaatttaatatcaatatatattctgtgtatgaaaatatttttcataaaaattgtttgaatcatgtaacaatcatataaattgctgtttatattgttgtgaaaatgagttgacaaaagtcggtatagatatgtagacatcctatttttagcgaggtaggttgataaggcatatcggataaatttataagccataaaatagataaatagtgtttgtatccaaaaatatgagaaagttaaaactatttttcaaaataaacatgattcaccacataaataaatatacataagctatcgataacaacttaagaaaggtggatatataaatgaaaagaaagattattatggattgtgatccaggacacgatgatgcaatagcattaattttagcgggggcaattgacagtccactagagatattagctgtaacaacagtcgcaggtaatcaatcagttgacaagaatacgacaaacgccttgaacgtattggatattatgggacgccaagatatagcagtagcgaaaggtgcggataggccgttaattaaaccagctgcctttgcttctgaaatacatggggaatctggattagatggtccgaaactaccgtcgacaccatcacgtcaagcagttgcaatgccagcatcagatgtgattataaacaaagtgatgacgagtgatacacctgtaacaattgtagcgacaggtcctcttacgaatgtagcaacggcattgattcgtgagccaagaatcgctgagcatattgaatctattactttgatgggtggtggtacatttggaaattggacgcctacagcagaattcaatatttgggtagatgctgaagcagcgaagcgtgtttttgaaagtgggattactataaatgtgtttggtttagatgtaacacatcaagttttagccgacgatcacgtgattgaacgctttgaaagtatcaataatcctgttgcacagttcgtcgtagaattattgcaattctttaagaagacatacaagactcactttaatatggatggtggtccaatacatgatgcttgtacaattttgtatttgttacaaccagaattgtttacaatggtacccgttaatatcgacattgaacatcaaagtccactaacttatggcactatggctgtcgatttaaatcatgttacaggtaagcctgccaatgcttattttgctacagcagttgatgttgaagaagtgtggaacttgatagaccataagttacgtacatacgaataataatacttaattaaatagatacagttaaccctaaggcgcctgatataagcgtccttagggtttttgtattgggttacaatggtcatgacaatttgataatgattgagatatgtatgttaaaaatgcttcaaaaaaacacaaaacacaaaaatatatgcaaaaatttcaattgctttattttaaaagattaaaatcacaaaaaatatagatataattgaaatgttgttaaaacatcacaatgatgtacatgctcattttgaaaatatgtgttcaaagtgtgtacatcggtgtgacgattgatgataaattgagctcagatgctcaaaggagaatcgaacatgaacggggataatcagcaaatactcagagaaattgtattgaatcctactattcatggtaaagaacttgaatcgatatttggtttgtctcgtagacaactaggatatcgcattcaaaaaatcaatttgtggcttgaacaagagggttatccaaaacttgaaagaacaagccaaggaaattttattgtaagttctgaaatcatgacgttattcaagcgagatgtatcggagcagcaaatgttaaacggcaacaatgtcatttttagcatagaaacacgtcgttattatttaatgctcatgctttttagtaaggaaaacgcaatgtctctaaaccatttttcaattgatttacaagtcagtaaaaatactgtcattcacgatataaatcatgtgaaagagcaattggaaaatcatggtttgtcacttaagtattctcgaaaacatggttatgaaattgttggtgatgaatttgaagttcgccgtttcttcattaagttgattgatcaaaggttgaatcatgatattactaaaagtgaagttttaaaggcgctcaacttaacattcgaagatatcgcatatcaaaaagacaagatcaaacaggtagaacaatttttgaagagtcgctttatagacaaatcacttagttcattgccttatgtcctttgtgtgattcgtagacgaattcaaagtggtcatgtgatgaatccattaaatattaattatcagtatttgagggatacgaaagaatatcaagcaacggagattatgacgcaacatgagccggatttgccagaagcggaaaagttatatttgacattacacttactttcaacaagtgtgcaatggactgatttgcaagaatcagatagcatatcgaatttaacgatggccatcgctcaaatgattcaccattttgaacaaatcacttttattaacattgaagataaggagaaattatcacagcaactcttgttacatttaacgcctgctttttataggattaaatataacttaacggatcgtgatgaattaataaatcctttacaaggaaattatcaatccttatttcatatggtgaaacaatcatgtcaatcgttaactgaatatttcggaaaatcgttgcctgataatgaaatagcatatttaaccatgttgttcggaggtagtttgagacgtcaagatgaaaacttcgatggcaagataaaagctattatcgtgtgtacacaaggcacgtcagtatcacaaatgatgttatacgagttgcgaaacttatttccagaaattattttcttagatgcgatttcacttagaacatttgaaaattacacattagattatgacatcgtcttttcaccaatgtttgtcctaacacataaaaaattatttatcacaaaagtagctttatctgaaaatgagcaacgaaagttacgtaaagaagtgatgaagtacattaataaggaatcggctgacattgataaggaaataaacaagttaatggcattaattgaacgcacaacgacagttaatgacattacagaactacgtgatggtttagaagattttattgccaattataattcaatttcaaccattaatggatcgattgtcacacaaaataagacattagatttagctgacttgataccggcaaggcacgtgaaaagaatgcatcatgttgaaaatattgatgaagctattgctaaagcaagtgatgtgttagttgctaatcattttattgatattaaatatattcatgagatgcaacaggtatttgatgattcgtatatggttatcatgcaaaatattgctattccacatgcatactctgaaaagcatgtacataaaacagcgatgagtatgttgatattacaagaaccaatatacatgtcagatggcacagcaatccatattattgtacctattgctgctgttgataaagtgacacacttaagagcgttactacaattgagagatgtggcgcaagacaatgacgcaattaagcgcatcatacaaagtcgcaaaaattctgatgtaaatgagattttaaaaaattattcaaataaagaagcgagggaaaatggatgggacagcaattagtgcataaagaaaatataatgctcaatttgtcggcaactgataaagaatccgtattgtcacaaatgtcagatgtgttatttcaaaatgggttcgtgaagtcaacgtttaaagatgcagtcatcgacagagaaaaagaatttgctactggtttaccaacgcatctatgttcggtcgctataccgcatacagatgtcgaacatattaaccatagaacgataggtgtggctgttctagaaaaagaagtgccgtttattgaaatgggaacacttgatcaacagacagaagtgaaaatcgtttttatgttagcaatggataaagtagatgatcaacttaagctgttacaacagttgatgcaaatttttcaaagtgaagaaaaattggagcagattctacgaacgaaagatgaaacaattttagcaacactaatcaatgattatttggaatataactaaaaattaattggaggaattgaaaatgaaacaagtattagtagcgtgtggtgcaggtattgcaacgtcaacagtagtaaataatgcaattgaagaaatggcaaaggaacacaatattaaagtagatattaaacaaatcaaaattacagaagttggaccttatgaagacactgcagatttattagttacaactgcaatgacaaaaaaagaatataaattcccagttatcaacgcacgtaatttcttaactggtattggtattgaagaaacaaaacaacaaatcttaacagagttacaaaaataacggaattgatatgtaacgtgggtcgataacatattaatatatgcaaattgcatataaatgactatcacgacaaatgattgttgatgacatagaaacgcagtgactgtaattcaaaaggactgcagtcgaatttagcaagggttgtcgttgaaatgactgtaacgtcaaatgtaatcacaatcggaaagtatcgtgacaatgcatatataacagggagggtttaaatatgagttacttcactgattttgtaaggggatttttagatttaggtgcaactgttattttaccggttgtcatattcttgcttggcctattctttaggcagaaaattggagcggcatttaggtctggtttaacaataggtgtggcttttgtagggattttcttagtcatcgatttattagttaaaaatttagggccagcagcacaagcgatggttaaaaatttaggcgtcagtctgaatgtgattgatgtaggttggccagcaacatcatctatcgcttgggcatcatctgtcgcagcatttattattccactcggaatcatagttaacgttgtattgctagtaactaaagtgacaaagacgatgaatgtagatatttggaatttttggcattatacgtttacagcagcaatggtttatgccgtatcaggcagtatttggcaagcgttattagcagcagttattttccaaattatctgtttgaaagtagcagattggacagcaccgatgatgagtgagttctttgatttaccaggtgtatcgattgctacaggaagtacaatttcttatgcaccaggtatttacttagttaaattgttacaaaaagtacccggtctgaataagttagatgctgatcctgaaacaattcaaaaacgttttggcgcatttggagagtctatatttgtcggcttaattttaggtttaggtattggtgtgttagcaggttacaaacctggagacatcattaatttaggaatgtcaatggctgcagtaatggtattaatgcctagaatggtaaaaatcttaatggaaggtttaatgccagtttcagagtctgcaagaacatggctaaataaacgttttggcgaacgtgaaatttatattggattggatgcggctgtagcattaggtcatccagcagttatttcgacagcattaattttagtacctatcactgttttattagccgttattttaccaggaaaccaagtactaccttttggtgacttagcaacgataccatttgttgtcgcgtttattgttggtgcagcaagaggaaacattattcattctgtcattgtgggtacgattatgattgcaatttcactatatattgcaacagacgtagcacccattttcacagatatggcgaaaggtacgaatgtacaaatgccaaaaggttcatctgaaatttcaagtattgatcaaggtggtaatatcgttaactatcttatctttaaactatttagtctattcaattaaaaatcgaggtgtttgtggtgaaagctttagtaaaaacaagagaaggacatggcaacttagaacttcttgataaagaagttgcaacaccgctagatgataaagtaaagattaaagtacattatgcaggaatttgtggcacagatattcatacttatgaaggtcattataaagttaattttccagtgacattaggtcatgaattttctggtgaaatcgttgaagttggagcagacgttaaagattttaaagttggtgaccgtgtcacatctgaaacgacattctatgtttgtaatgagtgtgaatactgtaaatcaaaagactataatttatgcaaccatcgaaaaggtattggaacacaagttgatggcgcatttactaattatgtcattgcacgtgaagaaagtttgcatcatattccagacgaagtatcgtatcagtctgcagctatgacagaaccattagcatgtgcacatcatggcgtttctaagattcaagtcaattcaggcgatgtagcagttgtaatgggacctgggccaatcggattacttgtagcacaagtgttaaaaagtaaaggcgcaactgttgtggtaactggattggacaatgacaaagtcagattagataaagcagaagcattgcacatggattatgtagtcaatttacaacaaacagacttaaaaacgtatatcaatggaattacagacggttacggtgcagatgttgttgttgaatgttcaggtgcagttccagcagcacgacaaggtttggatattttacgcaaaaaaggtttctacagtcaaataggtatttttaaggatgctgaaattccatttgatatggaaaaagtgattcaaaaagaaataacagttgttggtagtagaagtcaaaagccagcagattgggaaccttcattgcaacttatggcggatggtttagtaaatgctgaagctttggtgacaaaaatatatgatatttcgaaatgggacgaggcgtatcaacatttaaaatccggcgaaggtattaaagcattacttaagccgctcgatttagatgaaaatgaaggagagaattaatatggtagaatcaatgctaacttttatgcttgggccattaagacaaatcactgatttttatatggaacatttactcgtaagtaattccattgtcattgcaggttattttgcgacaggtatttttaaaaagaaaaaagttgtgaattaaatcaaatttgaggtgatttacaagtgaaagcattgaaattatatggcgtggaagatttacggtatgaggataatgaaaagccagtcattgaaagtgcgaatgacgttattattaaagtacgagcgactggcatatgtggttcagacacgtcacgatacaaaaaaatggggccatacattaaaggtatgccatttggtcatgaattttcaggtgtagtagatgccattggaagtgatgttacgcatgttaatgtgggcgacaaagtgacaggttgcccagcaataccttgttatcaatgcgagtattgtttaaaaggtgaatatgcacgatgtgaaaagttattcgtcattggctcatatgaacctggatcgttcgcggaatatgtcaaattgccagcgcaaaatgttttaaaggttccagacaatgttgattacattgaagcagcaatggttgagccatcagccgttgttgcgcatgggttttataaatcgaatatacaacctggtatgactgttgcagtaatggggtgtggcagtataggtttgttagctattcaatgggcacgaatatttggtgctgcacatatcatcgctatagatatagatgcgcataaactagatattgcaacatcattgggcgcacatcaaacaatcaattcaaaagaagaaaatcttgagaaattcatcgaaaatcattacgccaatcaaatcgatttagctatagaatcatcaggtgctaaagttacgattggtcaaatattgacgctacctaaaaaaggtggcgaggtggtattactcggaataccatatgatgatattgagattgatcgcgttcattttgaaaaaattctgcgtaacgagttgacagtatgtggctcttggaactgtttgtccagtaattttccgggcaaagagtggacggcaaccttacattatatgaagacgaaagatattaatgtaaagcctattatttctcattttttaccgttagaaaaaggcccggagacatttgataaattagttaacaagaaagaacgatttgataaagtcatgtttacgatttattagtatgcacctttgaggacgaaaacgctggtatagttatagctatgaaagtgcgaatgccgtctggtctatagatactatcgaaataattcatcttcgaatatacgttgataaatagccggtttacttgtgtgaaatatgcttgtgaatcggttgttttgcattttgtatacttaaaatgagatggcaatatttgataatttttaaagtgaaaatcaagtacagccacttaataagataaatttattataatatatggtaaaatgatggcagtaataatgaatttgaaaaagagtaaacattaatacctttaacaatttaatatcgtcagagttaatgattaactgcatggcaaaacaacttagaatggtcagttacaaaaatacatttttataaaaaattatcacactattgtgacaactatctttggattaataaaagaggcaagtgagcaataggttaggcttatgtgcgggcataggtcagtaatgtataaatggaaatgatgtaatgacagaatggaggacaacatgatttatgcaggtattttagcaggaggtattggttcgagaatggggaacgtgccattaccaaaacaatttttagatattgataataaaccgattttaatccatacaattgagaagttcattttagtgagtgaatttaatgagattattatcgcaacgccagcacagtggatttcccatacacaggatattttaaaaaaatataacattacagatcaacgtgtcaaagtagttgcaggtggtacggatcgaaatgaaacaattatgaacattatcgaccatattcgcaatgtaaatggaattaataatgatgatgtgattgtaactcatgatgccgtaagaccatttttaactcaacgtattattaaagagaacattgaagtagcagcaaaatatggtgcagtagatacagtcattgaagcaattgatacgattgtaatgtctaaagataaacagaacatacacagtatccctgtaaggaatgaaatgtatcaaggccaaacaccacaatcatttaatattaaattattacaagatagttatcgcgccttaagtagtgaacaaaaagaaatcttatcagatgcatgtaaaatcattgtcgaatctggacatgcagttaaattggtacgtggagaactatacaacattaaagtgacaacaccgtatgatttaaaagtagcaaatgccattattcaaggtgatattgccgatgattaatcaagtatatcaactcgttgcaccgagacagttcgacgtcacatataataatgttgatatttatggtaatcatgtcatcgtaagacctttatacttgtctatttgtgcagctgatcaaaggtattacacaggtcgaagagatgaaaatgtactacgcaaaaaattaccaatgtcattagttcatgaagctgttggtgaagttgtatttgatagtaaaggggtatttgaaaaaggtacgaaagtagtaatggtaccgaatacacctacagagcaacatcatattattgcggagaattacttagcctctagttattttagatctagtggttatgatggttttatgcaagactacgttgtgatggcacatgatcgtatcgttccgctgcctaatgacattgatttgagtacgatttcatacacagagttagtgtcagtaagttatcatgctatacaacgatttgaacgtaaatctatacctttgaaaaccagctttggtatttggggtgatggtaacttaggttatattactgctattttgctacgtaagttgtacccagaagctaaaacttatgtatttggtaagacagactataaattaagtcatttttcatttgtagatgacatctttacagtaaatcaaataccagatgatcttaaaattgatcatgcatttgaatgtgttggaggtaaaggaagtcaagttgcacttcaacaaatagttgaacatatttcaccagaaggcagtattgctttgttaggcgtaagtgaattacccgtggaagtgaatacacgattagtacttgaaaaaggattaacgttgattggtagtagtcgaagcggctctaaagattttgagcaagttgttgatttatatcgtaagtacccagacatagttgaaaagttagcattattaaaaggacatgaaattaatgtatgtacgatgcaagatatcgtccaagcgtttgaaatggatttatcgacatcttggggaaaaacagtattgaaatggacgatttaataaaccgatgggggaataacaatgacaaaaacgaaacaagcaatacatattgataacatatactgggaacgtgttcagttatatattgaaggacatagtgaaggtgtcgatttaacatcaggacaatttgttctgaggaatttaaccgaaacaaaaacattagaagcaaatgaaatgaaaatagacggtaatacatttatatgtagattcaacgtcgcaatattagacgatgggtattatttaccaatggataaatatttatttgtttatcatgaccagttagagtatattggacaacttaatccaaatattattgatcaagcttatgcggcattaaatgaagagcaaattgaagaatacaatgagctgactacacaaaatggaaaagtgaactatttattagcgtatgatgctaaagttttccgtaaaggtggcgtatcacaacatacggtctataccattactccggaaatagcaagtgacgttaacgaatttgtatttgatattgaaatcaccttacctcaagagaaatcaggggtcattgcgacaagtgcacactggcttcataaacaaggtcataaagcttcatttgaaagtagaagtttcttatttaaagctatttttaatattacaaagttactacatattaaaagaagcaaaacaatattattcacatcagattcgcgtccgaatttatcagggaatttcaagtatgtatatgatgagttactacgccaaaaagtagattttgattatgatattaaaacggtatttaaggagaatattacggatagacgcaaatggagagacaagtttagattgccatatttacttggtaaggccgattatatttttgttgatgatttccatccattaatttatacggttcgctttagaccatcacaagaaattattcaagtgtggcatgctgttggtgcctttaaaacagttggctttagtcgtacaggtaaaaaaggtggtccgtttatcgattcattaaaccatcgtagttacacgaaagcatatgtttcatcagaaaccgatattccattttatgctgaagcatttggaattagagaagaaaatgttgtaccaacaggtgtaccacgtactgatgtactatttgatgaagcttatgcaacacaaattaaacaagagatggaagatgaattgccaattataaaaggtaagaaagttattctattcgcaccgacatttagaggtaatggtcacggtacggcacattatccattttttaaaattgattttgaacgtttagcaagatactgcgagaagcataatgcagttgtgttattcaaaatgcatccgttcgtaaaaaatagacttaatatttcacgtgaacatagacaatactttatcgatgtgtcagatcatcgtgaagttaacgatattctctttgttacagacttgttgattagtgattattcatctttaatatatgaatatgcagtatttaaaaagccgatgattttctatgcatttgacttagaagattacattacgacgcgtgatttctatgaaccatttgaatcatttgttccaggtaaaattgtacagtcctttgatgcattaatggatgctttggacaatgaagattatgaggttgaaaaagttgtgccattcttagataaacattttaaatatcaagatggtcgctcaagtgaacgtttagtcaaagatttgtttagacgctaatgttggcatatattacttgccatgcaaatgagtcataaggcatagttttcaagaagggttctgacaatgaagtgagcaacatgtcatgatgagaagcaggactatacaatgagaataaccttttgatttttcatgcataaggcgattcaatcaaaagcaatcaccttccaactgaattgtcattttgtaaaataaaataatcgatccaatcgttatctaattcataaatgtgtaaacacatacgttatgaatggataacgattttttgttatgttaaagtggtacattaatcatgtatttcgtatgataattaacgacaagtgtaatggttaaatgtattttatgatgaaatgctataataggcatggttacaatgagcttgctcatacatattaatataattacaaaaacacgtcggaggtacgacatgattaaaaatacaattaaaaaattgatagaacatagtatatatacgacttttaaattactatcaaaattgccaaacaagaatctaatttattttgaaagctttcatggtaaacaatacagcgacaaccccaaagcattatatgaatacttaactgaacatagcgatgcccaattaatatggggtgtgaaaaaaggatatgaacacatattccaacagcacaatgtaccatatgttacaaagttttcaatgaaatggtttttagcgatgccaagagcgaaagcgtggatgattaacacacgtacaccagattggttatataaatcaccgcgaacgacgtacttacaaacatggcatggcacgccattaaaaaagattggtttggatattagtaacgttaaaatgctaggaacaaatactcaaaattaccaagatggctttaaaaaagaaagccaacggtgggattatctagtgtcacctaatccatattcgacatcgatatttcaaaatgcatttcatgttagtcgagataagattttggaaacaggttatccaagaaatgataaattatcacataaacgcaatgatactgaatatattaatggtattaagacaagattaaatattccattagataaaaaagtgattatgtacgcgccaacttggcgtgacgatgaagcgattcgagaaggttcatatcaatttaatgttaactttgatatagaagctttgcgtcaagcgctggatgatgattatgttattttattacgcatgcattatttagttgtgacacgtattgatgaacatgatgattttgtgaaagacgtttcagattatgaagacatttcggatttatacttaatcagcgatgcgttagttaccgactactcatctgtcatgttcgacttcggtgtattaaagcgtccgcaaattttctatgcatatgacttagataaatatggcgatgagcttagaggtttttacatggattataaaaaagagttgccaggtccaattgttgaaaatcaaacagcactcattgatgcattaaaacaaatcgatgagactgcaaatgagtatattgaagcacgaacggtattttatcaaaaattctgttcattagaagatggacaagcgtcacaacgaatttgccaaacgatttttaagtgataacttaaaaacaataaaaaattataaattaattagttaagtgatataaataataaacgaaatgtttgcttgtatgttattatttgtgtatgaaaacgtctgatataatgtaatataggtttaaacaaaatatgctaaaatataagcaaaatatgtataattttaagtaatacacagacatttagagttttgattttaaaatgagttttcaattggaaaatgcaacgaaatttaaataattaaatatagatatagttgaatggaggaagtattttatgaaatacgctggtattctagctggaggtataggctcaagaatgggtaacgtacctttacctaaacaatttttagatttagacaacaaaccgattttaatccatacattagaaaaatttattttaattaatgattttgaaaaaattattatcgcgacgccacaacaatggatgacgcatacgaaagatacacttagaaaattcaaaatttctgatgaaagaattgaagtcattcaaggtggtagcgatcgtaacgatacaattatgaatatcgttaaacatattgaatcaacaaatggtattaacgatgacgatgtcattgtgacacatgatgcagttagaccatttttaacgcatcgtattattaaagaaaatattcaagctgctttagagtacggtgcagtagatacagtgattgatgctatagatacgattgttacatctaaagataatcaaacgattgatgcaattccagtgcgtaatgaaatgtaccaaggtcaaacacctcaatcgtttaatattaatttattaaaagaaagctatgcacagttgagtgatgagcaaaagagtattttatctgatgcttgtaagattattgtagaaacaaacaaaccggttcgacttgtaaaaggtgagttatataacattaaagtaacaacaccttacgatttaaaagtagcgaatgctattattcgaggtggtattgccgatgattaatcaagtatatcaattagttgcacctagacaatttgaagttacgtataacaacgtagatatttacagtgactatgtcattgtacgtcctttatatatgtcaatttgtgctgccgatcaaagatattatactggtagccgtgatgagaatgtcttatctcagaaattgccaatgtctttaattcatgaaggtgttggtgaggtcgtatttgacagtaaaggtgtgtttaataaaggtacaaaagtagttatggtaccgaatacgccgacagaaaaagacgatgtcattgctgaaaactatttaaaatcgagctacttcagatcaagtggacatgatgggtttatgcaagattttgtgttgctaaatcatgatagagctgtaccactacctgatgatattgatttaagtattatttcatatacagagcttgtaacagtaagtttgcatgctattcgtcgttttgaaaagaaatctatttcaaataaaaatacatttggtatttggggtgatggtaacttaggttacattacagccattttattacgtaaattatatccagagtctaaaatatatgtctttggtaaaacagattataaattgagtcacttctcatttgttgatgatgtcttctttattaataaaatacctgaaggcttaacatttgatcatgcatttgagtgtgtgggtggtcgcggtagtcaatcagccataaatcaaatgatcgattacatttcaccagaaggaagcattgcactgttaggtgtaagtgagttcccagtagaagttaatacacgtctagtattggaaaaaggactaacgttgattggtagtagtcgaagtggttcaaaagatttccaagatgttgtagacttatacattcaatacccagatattgtagataaattagcgttgttaaaaggtcaagaatttgaaattgcaacaattaatgatcttacagaagcttttgaagcagacctgtctacatcttggggtaaaacagtattaaaatggattatgtaaatagaaaaggatgaattaacgttggttaaaagtaagatatatatagataaaatctattgggaacgtgttcagttattcgttgaaggacatagtgaaaacctagatttagaagatagtaattttgtattaagaaatttaactgagacacgtacaatgaaggcgaatgatgtcaaaatagatgggaatcaattcgtttgtcgtttcaatgtagctatcttagataatggttattacttacctgaagataagtacttattagtgaatgagcaagaacttgattatattgcacagttaaacccagatgtgattaatgatgcatatcaaaatctaaagccagaacaagaagaagaatacaacgaattagaaacacaaaatggtaaaatcaatttcttattgcagacttacctaaaagaatttagaaaaggcggcatttcgaagaaaacggtttatactgttacacctgaaatttctagcgatgttaatgaatttgtccttgatgttgttgtaacgactccggaagttaaaagtatttatatcgttcgtaaatataaagaattacgtaagtatttccgcaaacaatcatttaatacaagacaatttatttttaaagcgatatttaatacgacgaaatttttccacttgaaaaaagggaatacggtgttgttcacatcagactctagaccaacgatgtctggaaactttgaatacatctataacgaaatgttacgtcaaaatttagataaaaagtatgatattcacactgtttttaaagcgaatattacagatagacgtggcatcatcgacaagtttagattgccatatttacttgggaaggcagactacatctttgttgatgactttcacccattgatttatacagtgcgttttagacgttctcaagaagttattcaagtatggcatgccgttggtgcctttaaaacagttggctttagtcgtactggtaaaaagggtggaccatttattgattcattaaatcatcgtagctatacaaaagcttatgtatcatctgaaaccgatattccattctacgctgaagcatttggtattaaagagaaaaatgtagtgcctacaggtgttccacgtactgatgtactatttgatgaagcttatgcgacacagatcaaacaagagatggaagatgaattaccaattattaaaggtaagaaagtcattcttttcgcaccaacatttagaggtagtggtcatggtacagcacattacccatttttcaaaattgattttgaacgtttagcaagatattgcgaaaaaaataacgcggttgtattatttaaaatgcatccatttgtgaaaaatagacttaatattgcagacaaacataaacaatattttgttgacgtttctgactttagagaagttaatgatatactgttcataacagatttattaattagtgactattcatctttaatatatgaatatgcagtatttaaaaagccaatgattttctatgcatttgatttagaagattatattacgacgcgtgatttttatgaaccatatgaatcatttgttccaggtaaaattgtgcaatcatttgacgcattaatggacgccttggacaatgaagattatgaaggagaaaaagtcattccattcttagataaacattttaaatatcaagatggccgatcaagtgagcgtttagtcagaaatttatttggtagctaagtttatatagtagtcaaagtgggagaggtataatgatgaaattttcagtaatagttccaacatacaattcagaaaagtatataacagaattacttaatagccttgcgaaacaagattttccgaaaactgaatttgaagtggttgtagttgatgactgttcaacagatcaaacgttacaaatagttgaaaagtatcgcaataaattgaacttgaaagtaagtcaactcgaaacaaattctggtggtccaggtaaacctagaaatgtggcgttaaaacaagcagaaggtgaatttgtattatttgtggactccgatgactatataaacaaagagactttaaaggatgcagcagcatttattgatgaacatcactcagatgtcttattgattaaaatgaaaggtgttaatggtcgtggtgtaccacaatctatgtttaaagaaacagcacctgaagttactttgttaaattcaagaattatctatactttaagcccgactaaaatctatagaacagcattactaaaagataatgacatttattttccagaagaattaaagagtgcagaagatcaattatttacaatgaaagcatatttaaatgcaaatcgaatcagtgtgttaagtgataaagcgtattattatgctacaaagcgtgaaggtgaacatatgagtagtgcgtatgtttcacctgaagacttttatgaagtcatgagattgattgctgtagaaatattaaatgcagatttagaagaagcccataaaaatcaaatcttagcagaatttttaaatcgtcattttagtttttctcgtacgaatggcttctcacttaaagttaaactagaagatcaaccacaatggattaatgctctaggagactttatacaagcagttccagaacgtgtagatgcattggtgatgagtaaattacgaccattgttgcactacgcgagagcgaaagatatagacaactatagaactgtggaagaaagttaccgtcaaggtcaatactaccgttttgatattgtagatggtaaattaaacattcaattcaatgaaggcgaaccatactttaaaggcattgatatcgctaagccaaaagtgaaaatgacagcatttaaatttgataatcataaaattgttacagagctaacgttaaatgaatttatgattggcgaaggacattatgatgtcagacttaaattacattcacgaaacaagaagcacacaatgtatgtacctttaagtgtcaatgcgaataaacaatatcgttttaacattatgttagaagatattaaagcgtatttacctaaagaaaaaatttgggatgttttcttagaagtccaaataggtacggaagtatttgaagtgcgtgttggtaatcaacgtaataaatatgcatatactgcagaaacaagtgcattaattcatttgaataatgatttttatagattaacaccgtatttcacaaaagactttaataacatttcgttatactttacagctattacattaacggattcaatctcattgaagttaaaaggtaaaaacaaaatcattttaactggtctggatcgtggttatgtatttgaagaaggtatggctagtgtcgtactaaaagacgacatggtgatgggaatgttaagccaaacatcagaaaacgaagtgcaaatcttacttagcaaagatattaaaaagcgagacttcaaaaatattgttaagttaaacactgcacatatcacttatccactaaataaataataaatgccctcaaatcattgtgagccaacatgatttgagggctttattttgctgtttatgacatgattatgacatttccctgattttcattttcatatacattaaattgtatacactggaaatgaggaggttatctataatgataaataaaaatgacatagtagcagatgtagtaactgattatccgaaagcagcggatatttttagaagtgtgggaatagatttttgttgtggcggacaagtaagtatagaagcagcagccttagaaaagaaaaatgtagatttgaacgaattattacagcgtctcaacgacgttgaacaaacgaatacaccaggttcgttaaatcctaaatttttaaatgtttcatcacttattcaatatattcaatcagcatatcatgaacctctaagagaagaatttaaaaatttaacaccttatgtgacgaagttatcgaaagtacatggacctaatcatccatatttagttgagttaaaagaaacatacgatacatttaaaaatggcatgttagagcatatgcaaaaagaagacgatgtcgattttccaaaactcattaaatatgagcaaggtgaggtagtagacgatattaatactgtgatagatgatttagtttcagaccacattgcaacgggagaattgttagtaaaaatgagcgaattaacatctagttatgaacctccgatagaagcgtgtggtacttggcgacttgtttatcagagattaaaagcacttgaagtgttaacacatgaacacgtacatttagagaatcacgtattatttaaaaaagtatcataaataacgcgattagaaactgttggcaaaaataagtccagcagtttttcgctatgtataaaagtcataatagtgacataaacagcattatttgaaaagaaaaatggtcaacttagcataaaaattgatatgaaaatttaatggtatagataattaaatagtagcgtgtttttttaataatttattcatgaattttacatgcactattatgataaaataaacataattataattcactgaggtgctatcgtgctatcgctaacaatgttattacttgagcgtgtaggtttaattattattttggcctatgtgttgatgaatattccatattttaaaaacttaatgaatcgtcgacgtacatggaaagcacgttggcaattatgtattattttcagtttgtttgccttaatgtctaatttaactggtatcgtcatcgatcatcaacatagtttgtcaggaagtgtgtacttccgtttagatgatgatgtatctttagctaacacacgtgtattaacgataggtgtcgcaggattagttggtggcccttttgtaggtctatttgttggcgttatttcaggtattttcagagtgtatatgggtggggcggatgcacaagtttatcttatctcatctatatttattggtataattgctggttattttggcttacaagctcaaagacgcaagcgttacccgagtattgcgaaaagtgccatgattggaattgttatggaaatgattcaaatgttgagcattttaacattttcccacgacaaagcatatgcggttgacctcatatcattaattgcactaccaatgattattgttaatagcgttggtacggcgatttttatgtctattatcatttcaacattaaagcaagaggagcaaatgaaggctgttcaaacacatgatgtactgcaattgatgaaccagacattgccgtattttaaagaaggattgaatagagaatcggcacagcaaattgcgatgattattaaaaatttaatgaaagtatctgccgtagcaattacaagcaaaaatgaaatcttatcgcatgtaggtgcaggtagtgatcatcacataccaacaaatgaaatattaacaagtctgtctaaagatgtattgaaatcaggaaagttgaaagaagttcatactaaagaagagattggttgtagtcatccgaattgcccgcttagagcagctatcgtgataccacttgagatgcatggttctatcgtcggtacattgaagatgtattttacaaaccctaatgatttaacttttgtggaacgtcaacttgcagaaggattggcaaatatttttagtagccaaattgaacttggtgaagccgaaacgcaaagtaagttattgaaagatgctgagattaagtcattacaggcacaagtgagtccacattttttcttcaattcaattaacacgatctcagctttagttagaataaatagcgaaaaggcacgagagttactattagaattgagttattttttcagagcgaatttacaaggctctaagcaacatacgattactttagataaagagttaagtcaagtgcgtgcatacttatcactcgaacaagcacgttatccaggaagatttaatatcaatattaatgttgaagacaaatatcgcgatgtgcttgtaccaccatttttaattcaaattttagttgaaaatgccatcaaacatgcgtttacgaatcgaaagcaaggtaacgatattgacgtgtcagtgattaaagaaactgcaacacatgtacgtattattgtacaagataatggtcagggtatttctaaagataaaatgcatttgttgggagaaacatctgtagaatcagagtctggaactggtagtgctttagaaaatttaaacttacgcctaaaaggattatttggaaaatccgcagcattacaatttgaatcgacatcgagcggtaccactttttggtgtgtacttccttatgaaagacaagaggaggaataaatatgaaagcattaatcatagatgatgagccattagcacgtaatgaattaacatatttattaaatgaaattggtggttttgaagaaattaatgaggcagaaaatgtaaaagaaacattggaagcactactgatcaatcaatatgacattatatttttagatgtcaatttaatggatgaaaatgggatcgaattaggagctaagattcaaaagatgaaagagccacctgcgattatttttgcaactgcacatgaccaatacgcagtacaggcatttgaattaaatgcgacagactatattttgaaaccgtttggtcaaaaacgtattgaacaagcagtcaataaagtgcgtgcgactaaagccaaagatgataataacgcaagtgcaattgcgaatgatatgtcggcgaattttgatcaaagcttacctgttgaaattgacgataaaattcacatgttaaagcaacaaaatattattgggattggcacacataatggtattacaaccatacatacaacgaatcataaatacgaaacaacagagccattgaatcgttatgaaaaacgattgaatcccacttattttatacgtattcatcgttcatatattattaacacgaaacacattaaagaagtgcaacaatggtttaactatacttatatggtaatattgacaaatggtgtcaagatgcaagttggacgttcatttatgaaagattttaaagcgtcgataggattactttaacagtaatccttttttttatgcattttacctatgatattttgtatttcggactaaaaatcacgcaaatcgaagtgagccatctatactttagttaaatcaaacgtaggaggcaatggtcgtgaaacaacaaaaagacgcatcaaaaccagcacacttttttcaccaagtcattgtaattgctttagtactctttgtatcgaaaataattgaatcatttatgccaattcctatgcctgcatcagtaatcggtttagtattattatttgtattattatgtactggtgctgttaagttaggcgaagtcgaaaaagtaggaacgacactaacaaataacattggcttactcttcgtaccagccggtatctcagttgttaactctttaggtgtcattagccaagcaccatttttaatcattggactaataatcgtctcaacaatactattacttatttgtactggctatgtcacacaaattattatgaaagttacttcgagatctaaaggtgacaaagtcacaaaaaagatcaaaatagaggaggcacaagctcatgattaaccacttagcactaaacacaccttacttcggaatactgttatccgttataccatttttcttagcgaccatattatttgaaaaaactaatcgtttcttcttattcgcaccgctatttgtcagtatggtatttggtgtggccttcctctatttaacaggcattccgtataagacttacaaaataggtggagacattatttacttcttcttagaaccggcaacaatctgttttgcgattccgttatataaaaagcgtgaagtgcttgttaaacattggcatcgtatcatcggaggtattggtatcggtacagttgtagcgttattaattattttaacttttgcgaagttagcacaatttgccaatgatgttattttatcaatgttacctcaagcagcaactacagcgattgcgttaccagtatcagctggtatcggtggtataaaagaattaacatcattagcagttattttaaatggtgtcattatttatgccctaggtaataaattcttaaagcttttccgaattactaaccctattgcccgaggattagcacttggaacaagtggtcacacattaggtgtagcaccagccaaagaattaggacctgtagaagaatcaatggcaagtatagctttagtgttagttggtgtagttgttgtagcagttgtgcctgtctttgtagcaatattcttctaaaacgaaaaacctaagcaagataatagcaatttgagccattgttattatcgtaaaaaaacgtctatactccagtttataactgggatatagacgtttttatgtatttattactttttactaggaatataaaactgtgcatgacgataatgaaatacgatgtcagatgaatcaaagggtttgccagtcattgtataaaaagtctggtggtaacgtaaacatggttcacctgtagacaattgtagtaatgaagcttcacttgaagtgagttgatctacattaaagaaaatatctgaaaaaccaatacgaagtttcatgtttgattctaaatagtcgaagatagagcccttagcaatatcatcatttaaatatttcacgatttctttatgataataagaatattcgatacataaaacatcatcgtccacgaatcttaatcgctctaaatagtagacggtatcatctgcatttaattggagctcatcttgtacagatttaggtggcgttgcaatctccttaaaaacaagtaccttacttgtcattcggtgttcacctaaacttttagagaaaccattagtcttaaagacgttgatacgattggcatcagcaatatttctcacataaataccactgccttgtgcttgatagatcaaaccatcttgttccaataagcctaatgctttaatgatagtactcttacttacttgataacgttcttttaattgcgtcacgcttggcaatttatcaccgggtttgaaattagattgatgtataaacgcattaagttgcttagcaatatgttcatactttaacaatattctgtcctcgtttcactttgtctgtaattattatagcacaaaatattataattgtatcggcgtttacaaattgaaccggtacaattataattggaggtaagtaaatacattttcattctactatcaagttgagggggtaatatttatgagcaataaatataaagaacaagcccaagacattcttacagctgtaggtggtgtcgaaaacattgttgatgcaacgtatgatacgaagtgcattacaattcatatgcaacatacaattccttctacagcaaatgaagtgaaacaaatagttgatgtgacatctgtagcagaaaatgatacgcagttagtcataaaattaaatggaaatgtcgatgaagtgtatcagcaattacagcgattaattaagaatgctaatgtcgaagagagtgagaatactgacaatattaatagtcaagatacaagttatacacctcaagtaaaagtaacaacaccaattttagtgaaagcaccaatcgctggtcgtcgtattttacttaaagaagtaagagattcaatttttagagagaaaatggtaggtgaaggcttagcaatcaaagctcatgaagaatccaaagtaatcgcaccgttcaatggtttaatatctatgattgtaccaactaagcatgcagttggtattcaatcagaagacggtgtggacatagtcattcatattggcgtgaatacagttgacttggaaggtaaagggttcaagtgctttgtaaagcaaaatgatcatgttgaagcagggcaaacgttgttgcaattcgaccagcaatatatacaacaacaaggctacaatgctgacgttattgtcgttattagcaactctgccgatttaggaaaagtagaactgacaatgaatgaaatcattacgactgaagatgttatttttaaaatatttaaaaactaggagtgtgttgtaataatgacaaaattaccgcaaaatttcatgtggggtggcgctcttgccgcaaatcaatttgaaggtggatatgataaaggtggtaaagggttaagtgtaattgatgttatgacgagtggtgcacatggcaaagcacgtcagattacagaatctatagatcccaatcactattatccaaatcatgaaggtattgatttttatcatcgttataaggaagatattgccttgtttaaagaaatgggattgaaatgtttacgtacgtcgattgcgtggacacgtatctttccgaatggggatgaagatgtgccaaatgaagaaggactcgccttttatgatcgtatctttgatgaattaattgcacaaggtattgaacctgttgtgacgttatcacattttgagatgccacttcatttagcgaaacattatggtggatttagaaatagagaagttgtcgattattttgtgcattttgcgcgtgttgtatttgaaagatataaagataaagttacatattggatgacgtttaatgaaattaataatcagatggacacatcaaatcctatctttttatggacgaattctggggtagcattgacagaaaatgataatcctgaagaagtcttgtatcaagtagcacatcatgaacttttagccagtgctttagcagttcgtcttggtaaagagattaatccgaagtttaagattggaacaatgatttcacatgtacccatttatccatattcgtgtcatccgaaagatatgatggaagcacaaattgcgaatcgcttacgtttctttttcccggatgtccaagtgagaggttattatccaagctatgctaaaaaaatgttggcacgaaaaggatatgatgttggatggcaagaaggggacgacagtattttacagcagggcacggttgattatattggctttagttattacatgtctacggctgtaaaacatgatgttgatactacagttgaaaacaacatcgtcaacggtggtttgaatcattctgtggagaatccgcatatcgcaacgagtgattggggttgggcgattgatccagatggcttaagatatacattgaatgtgttatatgatcgttatcagttaccactttttattgtggaaaatggttttggtgcagttgatgaagtggtagatggacatattcatgatgattatcgcattgaatatttaaaagcacatattacagcagcgatagaagcagttgatcaagatggtgtagatttaatcggttatacaccgtggggaatcattgatattgtttcatttacaaccggtgaaatgaagaaacgctatggtttaatatatgttgatcgagataatgatggtcatggcacgatggaacgcttgaaaaaagattcgttctattggtatcaacaagtgatagcatcaaatggagataaattataaaggtatattataagtattttagggttagagcccgagacataaattaatatagtaggacctacagtgttataatggcgggcccccaacacaaagaatttcgaaaagaaattctacaggtaatgcaagttggcggggcccaacacagagaaattcgaaaagaaattctacaggtaatgcaagttggggaaggacagaaataaattttgcgaaaatatcatttctgttccaatcccgtgatgttaaaattttaagaaaaaaataatgccactaactatgtatagtgttaatgtttgagtgtttatgaaagtctttaaccaaaattgatgacttactaatcaacgataacgatattgttaagtagatgattagtgtcacaaagaaattaaagtgatagtcaaacatagatacaaagtacagttagtggcattatatttagtgctcttttttagcgacaaaagtaatataattcatatctttacgcaatttagtcatcgttttaaacattttacaaaacattggtcgattttcttttttcaaagcattgttgataatctttatagttccaacaataccttcgtcataaattaaaccttttggtgtcattaaactcattggaccagtatgataatgcacatgattaaaaccagcttgattatataaatctaaccagccaagtttcgtctgcggtgagacattgacattaattgctgcagataatgatttaacaacatgtgtggcatgtgattcattaacgatgacaatatcatgtgttaacaagatacccccaggctttaagactcggtagtactcgcgtaatgctttttcctttatggcgatgggtaacattgttaacattgcttcatttaaaacgatatcgaattgattgtcatcaaagggcaatttaacagcattcgcttgttgaacttgaatatatgattcaagacctgctgctgaaatgttttcctgtgctttttctaatgctttcttatttatatcaacgccttgaatgtgacagccatatgtatgagctagataaatagatgttgtgcacatattacatgccacttctaacacttgtttatcttgtgaaaatgccccttgttgtattaaccaatctgttgcttctttaccaccggggcgtagacgagtttttcctaatttagctaaaaatgtatgaccagcttctttagacatagcataacctccttttaattgataattattatcattaatatagcatatttatatgcgataatttggaagttaaaaagattacaaaaaattgtcacttcatttataactaaacatgagtcaacaagcataggtttagtggaaaattatttctaatagatgatgttttataaagataaaaaagcacagccatgatatacgaatgttgcatgttatatgctaaaccttcatatcatagctgtgtttgattcatttaaacttgatttacttcttctagtagaggaatagatgcttgcgcgccgtgtttttgtacagtgagtgagctcgctttattaccaaaatcaatagcatctgctaagttatcttgcgacttgtttaagcgactgacaaatgcaccaataaatgtgtcgcctgcagcagttgtatcaatcgcatttactttataagcttcgatgtgttggctttgatttttagtagcaaaatatgtaccttgcttacctagcgtaatcaaaacagtcttaatgcctatagataaaaagtaattggcattgtctttcatagattgttcattagttactttaatcccagataacaattcggcttctgtttcgtttggcacaataatatcgattaatgataataattcattaggtaatgctttcgctggtgcaggatttaatactgtcgtcacaccatgtgccttggcaatttcaaatgcagatataatagccgggatgggtacttctaattgtgcaacgacaaagtctgcattgattatagcgtcttttgcgttaataacatcttcaggtgtcatcgtcatattcgcaccaccataaacatagatggtgttttgtccttctgcattcacagtgataaaggcttggcccgtttttgcttcagctgttttgataatatatgatgtatcaatatgagctactttaaaatcttctaagatgaaatcagcaacgccatcagtgccaattttagtaataaatgttgtgtctgcttgcatgcgtgcagtggcaatagcctggttggcacctttacctccgccgaatgctttttgtgcttcttcaacatgtaatgtttcgcctggttgtgcatatctttcaactgttaaaaattgatcgacattcgttgaacctaaaataacaactttgttggtcatgtgtacgctcctttcaagttataacttttaaaaagtaacattcgattctaatgcaatattagagtagggcgttgtttcaccagtacgaatattacctttatttaatgggtgagctaagttacttttcatttcttcgtgaggaatgaaaatgatttcgatttccgatgaaatcaattgtttaatttgttgcaattgtgtagggttatgttcttttatttcttctgctaagtatattttttggatttccatttcttctaacactgtagctaagacatcaataaagcgtggtaagtttttagttacagctaggtcgatacgacgatgatcatttggaattggcatgccagcgtcattaatcgttaataaatcaaaatgaccaattgtcgcgattgcttttgaaatatgttcatttaaaacagctgattttttcatgacatctacactccttattttataaatactgtaacagaagcggctactaaaatgagtactaagccgatgattgtaataaccatttcttttgacgttttatgttgttttaagaaataaataccagttaatgtagcaagcacaacggatgtttgagaaagaataaatccagttgctaaaccattcatattaggttgtgctgaaataagatatgttaaagcaccaaatgcaaagaagaaacctgaaataatttgtaaccacgtaattttattacggaatggattctctgctttcatattcataaagccataaatgactgcaacaattaccatacccattgcttgaggtaaaaaggcagttaggccatcaatagaagttgcttgcggtgcagctgaatataaccagtatccaaattcaccaattaacagaagtaccactgcacgacgtaaatttttggcgttacttgcttctttgcgttcactccaaactgtcatacgcgctccaattagaataacgactaaagctgtaaatccaatgattttatgaccaatgcctggccaatttcctaatgcaaagacaccccataaagatgcgcctaataattggaatgctgttgtgactggcatggcacgagatgagccgactaattcgaacgctttaaatgtaatgatttgtccgaatccccatcctgcacctgataataaggcgaatagcaaattggttccagtagggaagccacttgatgtgactacggctaataaaatagcgaagattaacgtacctacagtagcaccgataatttgatgtacaggtttaccaccaaactttgaagcgactgttgggaagaagccccagccaattaaggggcctaacccgataagtaatgcaacaatgctcatgttatacacctcatgatttgtttttagtaaaacgttttaccagtgccatcgtaccatttttatttgtaaaatgcatgcgttttcataaaaactgaaaacgtttaaatcatatttaaaaattcatacattattattttaatttcttagtaaaataattatgattaaaaaccctcagcattaaagcaacgctaagggcctaacaatgatgagtatatttcggaagatacgtagttagtttgaaagatgatagccagttgttgcacgaatttttaaagtcgttggtaattcaatcatatcaatggatttatctaagtgctgtaatcgttgaagtaataaggttaaagatgttttgccaatatcagttataggttgtgccacagtagttaaaggtggcgagacgtacgctgcataatcaatgtcgtcataacctattaatgagatatctttcgggatactgatgccatgttcaattagtcctcgtaaaatgccaatagcgagttcatcgttaatagcgaagattgcagtggcagattgaaccatgatgtcatcaacaatggttagcccaccgcgcttagataattcagtatggacgatttgtggttctggcaattgattcgcgcgcaaagtatcgacaaatccagcgacacgagtcgacatattcgccatcatgtcatatggtgcaacaattatcatatggttgtgaccgagttctattaaatgttgtgctgcaagttgtccaccttgatattcatttgtccgaacaaaatctgtatagccttgatggtcattttgatccagtacgacataaggtacatgatgtttctttagatagttatttagggcgtccggggatgatatgtattgtgcgataattaatccgtcaatacctcgatcaattaaatgtttaatattgtcatacaaatcagttgctgtagatgttaaaaagcataaatcaacatcagatggtttatggtcatgaatactttgcatcagtgctgagaaaaacggatttgttaagctaggcaaaatgacgccaatagtttgaattttactgccgcgcaattgttttgcatgtttattaggggcatagcctaaacgttctgaaacagcatgtacgttttttatcgttgttgcggaaaaacgactatcattatgatttaaaatatgtgacacagttgtaactgatacaccagcttctctagcaacatctttaattgacacttttttcatattatattccttctctttattgtgtaattaatcatacagttatatacccgattattatattcatcatatcatgataaacatttgatgacatatgaagacgtgaatgacttttattgtctacaaacagacgtctgaagtatacgattaaggttgagacgagagaatatattattaaggttaataccttttaatgattatgataacaagaattttaaaatgtttattgtgattaaaaatacaaaagtcattattttaaagaataaaatatttgtttttgaacaaagtattaaaaaacataacgaaatgatgtatattgaactatgtgattgaaaaaatttttaattaaggcttgttaaaacttaagagaggatgtttttaaatgcaattcaaattaaaagaagaagagattattagttttttagaattgaaatatccagaaaaagagttcgaatatggtcgtttgttagttggacaacataaacgtgatgatttagatgtttattactttggtgatacgtttttaatgtgcacgattatttcattcaagacatttgaaattaaagaaacagtagaattatcatatgatgctgttaatcgtattgtgttaaaagatggatggttatttagaaaaatgagaatagaaacaatgcaaaaagtgttaaaatacggtacatctaaattaatgttaactgattttcaaaaagagaattataataaatatattcaaggtcagaaacaacgcgtgatatttgaaaatggccattttgtctaattgatagtgaatataattagagtaagaggctgggacataaatccctaaaaaacagcagtaagataattttcaattagaaaatatcttactgctgttctctatttatacaatacttcgtattgaatggcttcgctttcctagggtgccgtctcagcctcggtcttcgactggcactgctccctcaggagtctcgccattaatactacgtattaacatgtaattttactttgaaatactttaaaaaaataagacactttgcccaacttacactaccaataaaaacttctgttagaattcctcaaaatgatatttcgcgacatgttaatgaaattgttgaaacgatacctgatagcaaattcgatgaattcagacatcatcgtggcgcaacatcctatcatccaaagatgatgttaaaaatcatcttatatgcatatactcaatctgtattttctggtcgtagaatagagaaattacttcatgacagtattcgaatgatgtggttagctcaagatcaaacaccttcttataaaactattaatcgttttagagtgaatcctaatactgatgcgttaattgaatctttatttattcagttcgcttatttttcttggatttcttgtatatcattttaaagtgataaagatatttcgaaacataattcttctattatatttaagatttaactgtttttggaatgatcatgtatgcagacaatgagccaaggatcatcaatacaatgctgactataaatgttacggttgcagctacacttggtgcatagtttagttgtaacatactgaaaactgtagtacttagtgctataccaaaggagccacctaatgtaccactcattttatataatcctgtagctaaaccaactttttcattaggcatactgaaaattgcaatcgtaagtccaggtgttgcgactaaaccattacctatcgcacatatgacgaaaccaatgataactgcaatgacatattgtgatgccaataattgagtcatgctaataatagtgatgccgatgacagggaacaacggaccaatgatgagcatcaatttgccaccgaaacgtaatgttgctttttcacctaaacgaatcatcgcaactgccacaatggcatatggcaatgtaacaagtccagattgcgcagctgataaaccaaggtgtgtttgagcatatatgaaaaagaccactgttacgcctagaccgctatttaaaacaaagttatttaaaaatgcaccaatgaacggacggttgcgtaatactgagaaatcaataaaaggtacttcatgtcgacgttcgatgatgatgaatatcaacgtagtgatgataaaaatgctcagacaaatgattgaaaatgtactaaaccaaccttgttcgaatccttgtgttaacaataatgtaaagctaccaatcataacagcgaaaatcgacatacctttgtaatcgaatggatgacggtggctatgttgacttactttttcaggtgtgccttttagaagcaatatggcaatgaaagcaatgactatactaatgatgaaattcgtttgccatccgaaatttgaggcaattaaaccgccgataacaccagctaggccgatgccaccaacagtactaatcattagataactaatcgctcgtcttaaatgttctcctttaaattgattatttaacacgccaactgttgaaggtaacaagatagctgctgatagaccttgtaaaattctaccgatgatgagcagtgcagtgatgtccgatataattaatagaagagatgcaaacatactgattatgagacccatgtatgtcattctcagttgtcctattttatcagcaatatcacctgcagccaccatgaagatacctgtggcgaaggaagttaaactaatagataaatttaacacggcaggagaggtttgatatgtttgaccaacgagaggtcctatattaataaatgattgtgcaaacaaccaatatgttaatgcagacaacataatcgcaataataatattactgcgtggtgaagattgtgtgttattcacagatgtcactccttgtaaaaattaaatatagaaagtcatgagatgaagtgaacggatgtatagatgatcgttcactcacacataagtcatgatttccttacatatcataccacagttattgagaatgaatatcaattaattgcttgtataattgattttttatagtatgtttaagtgaaacagctttatttgaaagtgattaaagtaaatgaaggtacagaggagtgagaacaatgtgcacaggattcacaatacaaactttaaataatcaagtacttcttggacgcacgatggattatgattatccattagatggttcgccagcagtgacgcctagaaattatcgttggaaatcttgcactggcacgacaggccaaacgcaatatggctttattggcacaggaacagatatggaaggttttatttatggtgatggtgttaatgaacatggcgttgccatttcaacacaatatttccgaggttatagttcatatggatcaacacacaaagcggacgcgatgaatattacgcaaaatgaaattgtgacatggattttgggatatacaacaagcattgaagatatgaaacaacaagcatcccaaatacatgttgtagctgtatatttaaatgacatcggtgaagttccgccattgcattatcatgtttccgatgcaactggacatacagtcgaagtttcatttaaagagggtgaagtggttataaaagataatcctattggtgtcttaacaaatcatccagacttaaattggcattatagtaatttaagacaatatatcaatatttctccttatccagcaacagcaaatttattggaaggtgtaacgattgaacctttaggcaatgaagcaggtacatttggattgccaggtggatttacttcaactgagcgctttgtgagaatggcatttatgaaagcaaacattgctcaaaacaatgataaagaaatggatttaatgaatgcattttatttattagatgcggtaaatataccgattggaattgtacgtccgcatgatgctgacaatcactatacgatgtatcagaccgtaataaatttaactacaagaacgttatatattaagtattatggcagcaatgaattagtagcattaaagctcacagatgatttaattaatagaaaagatatgacgatttttaagcctgagaagcatatcactattagaaagttgaatgacaatcaatagcgattgataatggaatttggttgatatgatttgatggatgattactatcatgcattagcgttgaatcgcgaacatggacgaacgattagttgttaattttgaaaatttataaaaggttaaacgaatgcagtgagagatgtcattttaatatcaatgtatggctattttgtaatgacaatgtaatgagtttagtaaaacatttcgggaatattaaatagttggaaaatgagaattaaatcctttactcagttgtctaattcttttagtatgtgcagtacagtttaattgaaaactaactttaactttaatggaggatgttttatacatgaaaaaattaacagcagcagcgattgcaacgatgggcttcgctacatttacaatggcgcatcaagcagatgcagcagaaacgacaaacacccaacaagcacatacacaaatgtcaacacaatcacaagacgtatcttatggtacttattatacaattgattctaatggggattatcatcacacacctgatggtaactggaatcaagcaatgtttgataataaagaatatagctatacattcgtagatgctcaaggacatacgcattatttttataactgttatccaaaaaatgcaaatgccaatggaagcggccaaacatatgtgaatccagcaacagcaggagataacaatgactacacagcgagtcaaagccaacagcatattaatcaatatggttatcaatcaaatgtaggtccagacgcgagctattattcacatagtaacaacaaccaagcgtataacagccatgatggtaatggaaaggtcaattatcctaatggcacatctaatcaaaatggtggatcagcaagtaaagcgacagctagtggtcatgcgaaagacgcaagctggttaacaagtcgtaaacaactacaaccatatggacaatatcacggtggtggtgcgcattacggtgtcgactatgcaatgcctgaaaattcaccagtttactcattaactgatggtacagtagtacaagcaggttggagtaactatggtggcggcaatcaagtaacgattaaagaagcgaacagtaataactaccaatggtatatgcataataatcgtttaactgtttcagctggtgataaagtcaaagctggtgaccaaattgcatattcaggtagtacgggtaattcaacagcgcctcacgtacacttccaacgtatgtctggtggcatcggtaatcaatatgcagtagacccaacgtcatacttgcaaagtagataatacagaaaatcccaagttgcgatatcatacgcagcttgggattttttcgttttaataataggtataagtccattgtttgtcctctaaaacatgttgataaaaaggatcttggccaattaacttgatatcatctgcaagtgcttcaacttcatctaaatgatgggtagttaatataattaaacatttagatttcatgatgttaagtagttggtggatgtcatgtctagattttaaatcaataccaactgtcggttcatctaaaatgagaattcgaggttgacctagtaaacctactaatatattaattttacgtttattcccaccggacaatgtagatactttggcagacgtatcatcaaagtttaattgctgtaaatattcgttgatagttgtatcgttaattggatttttacaaagtgatttaaaaaatttaatgttttcagccactgtcatgtgttcaaataacgcaatgtcttgtggcacataaccgatgtgattttgtatttgtctttgattccatttttcgccgaaatagttgatagttccatcattagctttttcaataccagcaatcatacgaagtaatgttgattttccagcaccattatcaccaagtaatacggttaaacgattactatcaaaggacatagttaaatgattgaaaatctgtttgttacggtaacgctttgaaaggttattaatttctatcatcagttacgctcctttacatgaaaataatcaagtatacgatacccatagcaagtgcatatataaatgtcatgaataatcgatgacttattgtttgaatatggaataagataaagacgatacctatctcataaatcaatataagtaacagtgattttaagtaaaatattaagctgagtggttgagacaaatatagactaactgccaatagtaccaacaataacaaaatcgtatgtgtcattacataagtactatatagtttgaaacggcttaaatgatattgtgataatcgttgcaatgctgcttgttggtttaaacgataatgaagtactacttgaacagcgctaacaaataaaatcaccgcaaagattaagctaattgaaatagagtgttgtgcttgtttagtaagcgacacaaatttgattttagattcaggtgtatgtttatgataggacttgttgatagcatcgatggattgatgctgtttcatatcctcaaggtgttcataaataatgttaggaatttgctgctcatataatgaactactaacaatttctacagcaataccacctataaagtcatctctaccatataactgtatcgtttcttttaaacggttctcttttaatttttgagagaaacctttaggaatttgcatacttaaaatagcttcctttttagtaacatcatcttcaatatagctttcatcttcatcgacttttttaatagttacatagtcagattgtttaattttattgacgaatgattttgatgcagtggtttggtctaaatcttgaatggtaatcggtattttgaagttgtcatgtgctacacggtaaccgataccaataagtacgagtgcgatgacaatggttgttacgagcaagatgtattgtaaccattgcttgaacacaacaagttgtatataaggcttcattgacgatacctccaaaccaatacagctaaattaattatcaaaagtgcgatgaagctaagatagaaactagggtgcagttctaaaatgtagttgtttaaaataatttctaacaattgatttgttacaactgcgaacggttgaatattgaaaacaccatttgctatatgttgtaaaaaaatcgtaggtattgttaaaccagataacaccaggatgacaatagctaatatgactttactaatactattcaacaagcctgttgttaaaagttcgatgagtaataaccacagtattaaaaaggtaacataatagcttaaatgaatggctaacgttggccaattatataattcaaagatattcggaatactgaacacaatccaaactacaccaacgatactccataacatagtataaaaccatgtaatcaacgtacgaatgattaataaacgctctttagaaaaatgaaacattttcaatcgcgctttcaatacagtatcttgattcattttcaaaactgtaaataaagatagtgcaaagatgaataccgttgttaaaaatcctgtaattgcataataactgcccgtatcgtataaatgaatcggttctaagttaaatgcacctgaacggtttaatcctgtaatcagcaaatcagtcataacattgatactgtcagaatgtgatgctttcggtgctaagtcttgaaaagctaagatgccacccattgatcgcataagacgttggtaaacagaatctgttagctgagatagcacgacacttttcatggattgttgatcatatgtatatactgaaattggtagttcgccttgtttataaaatgccttggtcatacctttatcaaaaacaaaatagccttgaagtttatgtttttttaacaaagtatgtgcttgcttatcatcatatgctttaatgctcacgttttttcctaggttactccctttaccaatagagtttaagattaatttcgtttcacttgattgatctttatctacgacacctatattaaaatgattgtcatcttctgttacatgttggattgtcgttaatgtaataaggagtgccgctaatataaatagtaaatagataatcaaataccactttttcaataaaaaagagtggtagatgcgaaacaaatgtattgttttcatttaaccactcctccaatgataagattgaaaggcaagatgaccttccaatcttatttttatattttagttatttagatgccttttttaaaattgattcaaacattttgccgccatttttttcgatttctttttcaagtttttcacggtcttttgaagatagactattgaaatcttttgcaccactatcatcaaaatcaatatctgctttcaattttgtgctagattttaaaatgaaattaattggttcttcagcatatttgatgccgatatttaacgtagatttctgagtgttattttttacgtcagaatctatattattttcaaaagtgaattcattttcgtcgctatatttatctaatgcgacagtgattttacctttatcttgacgttttgtgccatctactttttcttggttatctaatttgatttttgattcatcatattctgtctttttaccaaattcgtatttatcattatatttattatctttttctttagaagatacgcctttaattgtatatttcgcttcagcatacgtgtatttatcttgatcgaaatcaagtgcgtaatctagttttaacttatcgtcttctaaagtattagtacctttgattttagttttattattttctttgtctgtaatagtaatttctcgttttacaatcgtatgtttttcggtataaattttagattgaattttagcaaattcatcctttttagtttctttgacatcgtcaattgcttttttgatgtctttttcaaagtcttttgtagcaccttgttcttccattaattttttaaggtctttatcctttttagcttcttctaatacagctaatgtaatttttttagtgtcagctctgctaagtgttaacgtgacaggtctaactttgtacttttcaccattaaccttaatttcttcttttttacctttatcaaaattatcgtcatctaatttgtcgacaataagttcggaatatttttcggcaattttgctgtagtcactttgttgtgcttgagcattattaaaaagagtatttaaatttagttgttggtttgtaataccattttcttttgctgtttcttcatcttcacctgtaagttttgaataagttgataataaatcagaattattaacactatatttccctttaaataatggtgattcgaaataatgcttatctttatctgcagctaactggaatttccctaatgcagagtctgcgattgttggttcaagattaatcattgatttctcttttttaggatcatgtccatatgacattttaattttcgatgcattaacaacagatttaggaatgccaagccctttaacaatttcatctgatgcatctgcgcttaattctaatgaagataaaaacgaattatctttcatcttttcttggaacttcacttcattttcaaaacggtcattaaaataatctttatacatttttgctgtttgttgttcactttttaggtatgtatttttcggtgtattagcaaaaaatgcataaactccccatgcgattccacctattaatagtaagacaataataataggaattataatttttaactttttagacattttgcttcctcccaattatttatgagttaatcatatcagaacaatacattttattaaatggtttattttaaattttgtttaaattaatagaattttagttataataatgtttaataagttattggaaatctaataaactacaaaaaatagtttgattacataatgattcttgaaaaatgttggttaacttaataatatgcatttttttggcgaagaagatttatttaacttataaaaatattgaagtaagattggggagattatgaatttatggaattgaaagtcgatgattttgtaaagaatataaaaagaccatacttgactgtattgggagtatttgtagttgcagtttcattattttttgacgcgattatgtttttctacgctaaactatatgataaattgcctatgtatttactggtgtttatggcctttacagctgtaattttgattatgatgtacatacaagagaaaaatgaaaattacaaagttgaaaaaagatatgtggttagatatctcacacttaacgttattgtgggatatactttgccattgctttttgtatctatttacgtttttggtgtagtcggttttggatttgatgttttcaattattgtctaggtattatcttgatgttatttatttcttggttaggtttatttttattttataaaaacgaatttgatagtgaaaatcctaatcctgcagttaatgccatagcaattattataaaattatttgcttttggaggaatattttatataagtctaatagttcctgtaacacagcaagaagagatttttatagggttaagtatattcatcaatataattgttgatgctcttcttgttaggtcatattttaattacgcgttatataagagtattaagaaagatatcgaaaatgaaggtaagacaatgtaaaggaaagacataaaaaataataggagtctaaccatgataatttttattttaataacaatatttgctatttattatatagctatgattgctagtttgtttaaaagtgaaggtttttcaataataggtttaatattagatgttgttataatggggacattgattttttactattttataggcgctcgctttgttgatcatgatttaagcaactttttaatgtttatggatactggatcatatatttttatgtactttgcaattaagtgtttatgggtgaaacctaaggtagtaaattatttgattgcaaaagaattgggtgaatctaaagaggtcattgaagagcaggaattagatttacagacatcaaagataagaggtatctactttttcattatttcagtagtgatgttaattatcactaaattaagaatgcaacctgagttacaggcagatgctatatcgatgaatcctgtatttatttttgttggtgttataatcattttaatttggctagtactggatatatatcgcaagaaaaaatacggtatattcttattcaagacgatagtgccactagttgttacgacttggattattatagctacaattatactttcgtaaacgattttgattaatggggaatgtagagaacatttctttgtaattttataatcgaataacatacaaaataaagcgaccaattttgcagtgttacgaattgtaaactgcgaactggtcgctttttattgatgtcatgattaatttaatggatgtaattatatgatgaaacttctgaagcagagatggttcttgatgaaacgatatattcaccaatccagttcatttctgaaattagaatacttccatcaatattaactttttcaacgtaggctacatgaccaaatggaccatttactgtttgtaaaattgatcctcgtgttgggtgtctatctactttgaagccattgcttgaagcttggcctgcccagtttttagcatctccccaaaatgtactaatcgtgtgtccatctttggcacgtttatcaaagacataccatgtacattgtccagcagtatataagttgttcttacttgtgataagaggctgatcaatgattttaccgttacctaatgctaaaggtttaccgtcagcggtctttgctttgtcattaaattcggcgatttgtaattcgtcatacaattcgtctaaatcgatgcctgtaataagccctttgttatcttttgaaaaagcgttatttaattcatcgtcattgtcttcgacattcggtattgctggtgtcaaaggattgcttggtgacgtttgaggcggtgtgtgtgaatcaattgcgtcattaatgtgcgtatactgaccacttaatgaagaatggtactgattgttgttaagatcacgttgatttgcgtgttgatgattgtcgtttgtacgtgactggttttgatgattgttgtttggcgtgttgtttttgtcatatgtataagtatacgcgccggtgtctttattcactttgaactgtgcgtttgggtgtgctttctttgcttcttctaatgttttgctatcattcgtatatgcttgagccgagttaggcgacatactaaataaagtaagagttgtcatcgtcagtaaaattgttttcttcataataaccatttaatcctttatgtatttaatttaattttagtatacacatttatattacaaaaatgaatggttaattaaaaatatatggttatattcaatatatttattttaaaaaagctaaaaatacttaaaaaactatatacatatactaataatttatatattatttgagtaaggagcactttttcaaaaaatagtgtccctaaaaagttttgataaacttaaaatattcaggaggtttctagttatggcaatgattaagatgagtccagaggaaatcagagcaaaatcgcaatcttacgggcaaggttcagaccaaatccgtcaaattttatctgatttaacacgtgcacaaggtgaaattgcagcgaactgggaaggtcaagctttcagccgtttcgaagagcaattccaacaacttagtcctaaagtagaaaaatttgcacaattattagaagaaattaaacaacaattgaatagcactgctgatgccgttcaagaacaagaccaacaactttctaataatttcggtttgcaataagcattctgaaattggcaaagtcacattttctaatgtggctttgcttatcatttttttaagaaaacaactgaaaggaaataagcatgaaaaagaaaaattggatttatgcattaattgtcactttaattattataattgccatagttagtatgatattttttgttcaaacaaaatatggagatcaatcagaaaaaggatcccaaagtgtaagtaataaaaataataaaatacatatcgcaattgttaacgaggatcaaccaacgacatataacggtaaaaaagttgagctgggtcaagcatttattaaaaggttagcaaatgagaaaaactataaatttgaaacagtaacaagaaacgttgctgagtctggtttgaaaaatggtggataccaagtcatgattgttatcccagaaaacttttcaaaattggcaatgcaattagacgctaaaacaccatcgaaaatatcgctacagtataaaacagctgtaggacaaaaagaagaagtagctaaaaacacagaaaaagttgtaagtaatgtacttaacgactttaacaaaaacttagtcgaaatttatttaacaagcatcattgataatttacataatgcacaaaaaaatgttggcgctattatgacgcgtgaacatggtgtgaatagtaaattctcgaattacttattaaatccaattaacgacttcccggaattatttacagatacgcttgtaaattcaatttctgcaaacaaagacattacaaaatggttccaaacatacaataaatcattattgagtgcgaattcagatacgttcagagtgaacacagattataatgtttcgactttaattgaaaaacaaaattcattatttgacgagcacaatacagcgatggataaaatgttacaagattataaatcgcaaaaagatagcgtggaacttgataactatatcaatgcattaaaacagatggacagccaaattgatcaacaatcaagtatgcaagatacaggtaaagaagaatataaacaaactgttaaagaaaacttagataaattaagagaaatcattcaatcacaagagtcaccattttcaaaaggtatgattgaagactatcgtaagcaattaacagaatcactgcaagatgagcttgcaaataacaaagacttacaagatgcgctaaatagcattaaaatgaacaatgctcaattcgctgaaaacttagagaaacaacttcatgatgatattgtcaaagaacctgatacagatacaacatttatctataacatgtctaaacaagactttatagctgcaggtttaaatgaggatgaagctaataaatacgaagcaattgtcaaagaagcaaaacgttataaaaatgaatataatttgaaaaaaccgttagcagaacacattaatttaacagattacgataaccaagttgcgcaagacacaagtagtttgattaatgatggtgtcaaagtgcaacgtactgaaacgattaaaagtaatgatattaatcaattaactgttgcaacagatcctcattttaattttgaaggcgacattaaaattaatggtaaaaaatatgacattaaggatcaaagtgttcaactcgatacatctaacaaggaatataaagttgaagtcaatggcgttgctaaattgaaaaaggatgctgagaaagatttcttaaaagataaaacaatgcatttacaattgttatttggacaagcaaatcgtcaagatgaaccaaatgataagaaagcaacgagtgttgtggatgtaacattgaatcataaccttgatggtcgcttatcgaaagatgcattaagccagcaattgagtgcattatctaggtttgatgcgcattataaaatgtacacagatacaaaaggcagagaagataaaccattcgacaacaaacgtttaattgatatgatggttgaccaagttatcaatgacatggaaagtttcaaagacgataaagtagctgtgttacatcaaattgattcaatggaagaaaactcagacaaactgattgatgacattttaaataacaaaaagaatacaacaaaaaataaagaagatatttccaagctgattgatcagttagaaaacgttaaaaagacttttgctgaagagccacaagaaccaaaaattgataaaggcaaaaatgatgaatttaatacgatgtcttcaaatttagataaagaaattagtagaatttctgaaaagagtacgcaattgctatcagatacacaagaatcaaaatcaattgcagattctgttagtggccaattaaatcaagtcgacaataatgtgaataagctacatgcgacaggtcgagcattaggcgtaagagctaacgatttgaatcgtcaaatggctaaaaacgataaagataatgagttgttcgctaaagaatttaaaaaagtattacaaaattctaaagatggcgacagacaaaaccaagcattaaaagcatttatgagtaatccggttcaaaagaaaaacttagaaaatgttttagctaataatggtaatacagacgtgatttcaccgacattattcgtattattgatgtatttactatcaatgattacagcatatattttctatagttatgaacgtgccaaaggacaaatgaatttcattaaagatgattatagtagtaaaaaccatctttggaataatgtcattacgtcaggtgttattggtacaactggtttggtagaagggttaattgtcggtttaattgcaatgaataagttccatgtattagctggctatagagcgaaattcatcttaatggtgattttaactatgatggtcttcgtacttattaatacgtatttactaagacaggtaaaatctatcggtatgttcttaatgattgctgcattgggtctatactttgtagctatgaataatttgaaagcagctggacaaggtgtgactaataaaatttcaccattgtcttatatcgataacatgttcttcaattatttaaatgcagagcatcctataggcttggtgctagtaatattaacagtacttgtgattattggctttgtactgaacatgtttataaaacactttaagaaagagagattaatctaatgttgatgaatagcgtgattgctttaacttttttaacagcatctagcaataatggcggacttaatattgatgtgcaacaagaagaggaaaagcgaatcaataatgatttaaatcaatatgatacaacgctatttaataaagacagcaaagcggttaatgatgcgattgctaagcagaaaaaagaacgacaacaacaaataaaaaatgatatgtttcaaaatcaagcgagtcactcgactcgcttgaatgaaactaaaaaagtgttattttccaaatctaacttagaaaagacttcggagagtgataaaagcccctatattcaaaacaagcaggagaaaaaaatattcccgtacattttgatgtctgtaggggcttttttgactttaggatttgtcattttttcaattcataaagggagacgaacgaaaaatgaatcagcacgtaaaagtaacatttgattttactaattataattacggcacatatgacttagcagtaccagcatatttaccgataaaaaacttaatagctttagtattggatagtttggacatttcaatatttgatgtcaatacacaaattaaagtgatgacgaaaggtcaattacttgttgaaaatgatcgactcattgattatcaaatcgctgatggagatattttgaagttactataggaggaaaaatagatggttaaaaatcataaccctaaaaatgaaatgcaagatatgttaacgcctttagatgctgaagaagcagctaaaacaaaattacgcttagatatgagagagattcctaagtcttcaattaaaccagaacattttcatttaatgtacttattagaacaacattctccatattttatagatgctgaattaactgaactacgtgacagtttccaaatacattatgacattaatgacaatcatacaccttttgataatattaaatcatttactaaaaatgaaaaattacgttacttactcaatatcaaaaatttagaagaagtaaatcgtacacgctacacatttgtgttggcaccagatgaattatttttcacaagagatggattacccattgctaaaacaagagggttacaaaatgttgttgatccattacctgtgtcagaagctgaatttttaacaagatataaagcgctggttatctgtgcattcaatgagaaacaatcatttgatgctttagttgaaggaaacttagaactacataaaggaacgccatttgaaactaaagttattgaagcggcaacgttagatttactaacggcatttttagatgaacagtatcagaaacaagaacaagattatagtcaaaattatgcatatgtacgcaaagtaggacataccgttttcaaatgggttgctatcggtatgacaacgttaagtgttttattaattgcattcttagcctttttatatttttcagtaatgaagcataatgagcgcattgaaaaaggataccaagcatttgtaaaggatgattatacgcaagtactaaatacgtatgatgatttagatggtaaaaaattagataaagaggcactttacatttatgccaaaagttatatccaaacaaataaacaaggtttagaaaaagataagaaagaaaatttacttaataatgtgacaccaaattcaaacaaagactacttattatattggatggaattaggacaaggacatcttgatgaagcgattaatattgccacttatttagatgataacgatattacaaagttagcgttgattaataaattaaatgagattaaaaataacggagatttatcgaatgataaacgttctgaagaaacgaaaaagtataacgataaattgcaagatattttagacaaagaaaaacaagttaaagatgaaaaagcgaaatctgaagaagagaaagcaaaagcgaaagatgagaaattaaagcaacaagaagagaacgaaaagaaacaaaaagaacaagcacaaaaagataaagaaaaacgccaagaagctgaaagaaaaaaatagtataggactgaggcaaagacaatgcataaattgattataaaatataacaaacaattgaagatgctcaatttgcgagatggtaagacatatactattagcgaagacgagcgtgcagatattacgttgaaatcgttaggcgaagtcattcatttagaacaaaataatcaaggtacttggcaagcgaatcatacttctattaataaggtgcttgttagaaaaggtgaccttgatgacattacattacagctttatacagaagctgattatgcatcatttgcgtatccttcaattcaagatacgatgacaattggaccaaatgcgtatgatgatatggttattcaaagcttgatgaatgccatcattattaaagattttcaatcaatacaagaatcacaatacgtacgcattgtgcacgataaaaatacagatgtgtatattaactatgaactacaagagcaactaacgaacaaagcttacattggtgatcatatttatgttgaagggatatggctcgaagtacaagctgatggtttaaatgtattgagtcagaatacagtggcatcgtcattaattcgcttaacacaagagatgccacatgcacaggcagatgattacaatacgtaccatcgttcgccaaggattattcaccgtgaaccgacggatgatattaagattgaaagaccgccacagccaatacagaagaacaatacagtgatatggcgttccattataccgccattagtaatgattgctttaactgttgtcatctttttagtgagaccaattggtatttatattttaatgatgattggtatgagtacagtaacgatagtatttggtattacaacgtatttctctgaaaagaaaaagtataacaaagatgttgaaaaacgagagaaagattacaaagcttatttggataataaatctaaagaaattaataaagcgattaaagcacaacgttttagtttgaattaccattatccaacggttgctgaaattaaagatatcgttgaaacgaaagcaccaagaatatatgaaaaaacatcgcatcatcacgatttcttacattataagttaggtattgcgaatgtagaaaagtcattcaaattagattaccaagaagaagaatttaaccaacgtcgtgatgaactattcgacgatgctaaagaattgtatgaattttacacagatgtagaacaagcaccattaatcaatgatttaaatcatgggccaattgcatatattggtgcacgacatctcattttagaagaattggagaaaatgctaattcaattgtcaacattccatagttatcatgatttagagtttctatttgtgacacgtgaagatgaagttgaaacattgaaatgggcacgttggttgccacatatgacattgagagggcaaaacattagaggatttgtttacaatcaacgaacgcgtgaccaaattttaacgtcaatttatagcatgattaaagaacgtatccaagctgtgcgtgaacgcagcagaagtaatgagcaaattattttcacaccgcaattagtgtttgtcattacagatatgtcattaattattgatcatgtcattttagaatatgtaaaccaagatttatcagaatatggtatttcattaatctttgttgaagatgtgattgaaagtttgccagagcatgtagataccattattgatatcaagtctcgtactgaaggcgaactgattacgaaagaaaaagaattagttcaattgaaatttacacctgaaaatattgataacgtcgataaagaatatatcgcgcgacgtttggcgaatttgatacacgtcgaacatttgaaaaatgcaattcctgatagtattacatttttagagatgtataacgtgaaagaagtagatcagcttgatgtggttaatcgatggagacaaaacgaaacatacaaaacgatggcagtacctttaggtgtaagaggtaaagatgatattttatcattgaacttacatgaaaaagcacacgggccacatggtttagttgctggtaccactggttcagggaaatctgagattatccaatcatacattttatctttagctattaattttcaccctcatgaagttgcattcctattgattgactataaaggtgggggtatggcgaacttatttaaagatttagtccatttagttggtacgattacaaacttagatggcgatgaagcgatgcgtgccttaacatcaatcaaagccgaattgagaaaacgtcaacgtttattcggagagcatgatgttaaccatattaatcaataccataagttatttaaagaaggtattgcgacagaaccaatgccacatttattcattatttccgatgagtttgccgaattaaaatcagaacaacctgattttatgaaagaacttgtatcaacggcacgtattggacgttcgttaggtattcatttaatacttgcgacacaaaaaccatcgggtgttgttgatgaccaaatttggtctaactctaaatttaagttggcattaaaagtacaagatagacaagacagtaatgaaattttaaaaacaccagatgcagcagacattacattaccaggtcgtgcgtatttacaagttggtaataatgaaatttatgaattattccaatctgcatggagtggtgcaacatatgacatcgaaggcgataaattagaagttgaagataagacgatttacatgattaatgactatggtcaacttcaagcaatcaacaaagacttgagtggacttgaagatgaagaaacgaaagaaaatcaaactgagttagaagcggtcatagatcatatcgaatctattacaacacgattagaaatcgaagaagttaagcgtccatggctaccaccattgccagaaaatgtatatcaagaagatttagtagaaacagatttcagaaaattatggtcagatgatgcaaaagaagtggaattaacattaggacttaaagacgtaccagaagaacaatatcaaggaccgatggtattgcaattgaaaaaagctgggcacatcgcgttaatcggaagtccaggatatggtagaacaacgttcttacacaacattattttcgatgttgcaagacaccatcgtcctgatcaagcacacatgtacttgttcgatttcggtaccaatggtttgatgccagttacagacataccacatgtcgctgattactttacagtagatcaagaagacaagattgctaaggcgatacgtatatttaatgatgaaattgatcgtcgtaagaagattttaagtcagtatcgtgtcactagtatttctgaatatcgaaaattaactggtgaaacaattccgcatgtctttattcttattgataactttgacgcagtaaaagattcacctttccaagaagtttttgaaaatatgatgattaaaatgacgcgtgaagggctagcattagacatgcaagtaaccttaactgcttcaagagctaacgctatgaaaacaccaatgtacattaatatgaaaacgcgtatcgcaatgtttttatatgataaatcagaggtgtcgaacgtagtaggacagcaaaaatttgcggttaaagatgttgtgggtcgagcattgttaagtagtgatgacaacgtatcattccatattggccaaccatttaaacatgatgagaccaaatcatataatgatcaaattaatgatgaagtatcggcgatgacagaattttataaaggtgaaacaccaaatgatattcctatgatgccagatgaaattaaatatgaagattacagagaatcattaaacttaccagatatagttgcaaatggtgctttaccaattggattagattatgaaggtgttacactacaaaaaattaaattaactgaaccagcaatgatttcatcagaaaatccgagagaaattgcgcatattgctgaaattatgatgaaagaaattgacatattaaatgaaaaatatgcgatttgtatcgcagactcaagtggagagtttaaagcttataggcatcaagtggctaactttgccgaagaaagagaagacattaaagcgattcatcaactaatgattgaagacttaaagcaaagagaaatggacggcccatttgaaaaagattcactttatattatcaatgattttaaaacatttattgattgcacgtatattccggaagatgatgttaaaaagcttattacaaaaggaccagaacttggcttgaacattttatttgtcggcattcataaagaattaatagatgcttatgataaacagattgatgttgcacgtaaaatgattaaccaatttagtataggtattcgtatttcagaccaacaattctttaaatttagatttattcaacgagaacctgttattaaagaaaatgaagcatatatggtcgcaaaccaagcttatcaaaagattagatggtttaaatagcaatgaattaaataggagggaggtatgttatgaattttaatgatattgaaacaatggttaagtcgaaatttaaagatattaaaaagcatgctgaagagattgcgcatgaaattgaagttcgttctggatatttaagaaaagctgaacaatataagcgattagaatttaatttgagttttgcactagatgatattgaaagcacagcaaaggacgtacaaactgcaaaatctagtgctaataaggacagtgtaactgttaagggaaaggcgcccaatacgttatatattgaaaaaagaaatttgatgaaacaaaagcttgaaatgttgggtgaagatatcgataaaaataaagaatccctccaaaaagctaaggaaattgctggcgaaaaggcaagtgaatattttaataaagcaatgaattaatattgaggtgaagatatgggtggatataaaggtattaaagcagatggtggcaaggttgatcaagcgaaacaattagcggcaaaaacagctaaagatattgaagcatgtcaaaagcaaacgcaacagctcgctgagtatatcgaaggtagtgattgggaaggacagttcgccaataaggtgaaagatgtgttactcattatggcaaagtttcaagaagaattagtacaaccgatggctgaccatcaaaaagcaattgataacttaagtcaaaatctagcgaaatacgatacattatcaattaagcaagggcttgatagggtgaacccatgatgaaagatgttaagcgaatagattatttttcttacgaagaattaacaattttaggtggtagtaaattgcctctcgtaaattttgaattgtttgatccatcaaattttgaagaagctaaagctgctttaattgaaaaggaattagtaacagagaatgacaagttaactgatgcaggttttaaagtggctacattagtcagagagtatattagcgccattgtaaatattcgaattaatgatatgtattttgcaccatttagctatgaaaaagatgaatatattttgttaagccggtttaaaaataatgggtttcaaatacgaattatcaataaagacattgcatggtggtcgattgtacaatcatatcctttattgatgagacaagaaaagtccaatgattgggactttaaacaaattgacgatgaaacattggagaacttaaataatgaaagtatcgatacgattgggcgtgttttagaaattgaaatatacaatcatcaaggtgaccctcaacaaagtttatataacatttatgaacaaaatgatttgttattcattcgatacccattaaaagataaagtgctgaatgttcatattggtgtcattaatacatttatacgagaattatttggattcgatactgatgaaaatcatattaataaagcagaggagtaatgacgttgagtggaaaaattagtgttaaagctgaaacgattgcacatgttgtaaaagaattggaaagcataagtcaaaagtatgatgaaatagctcaaaactttggaaaaatagcgcaattaaattactacagtagtgaaaaagctgcacattctatggaaaatggctatagtagtgctgcaacagtcattagtggtctcaaaggtccattgagtacactcggtggtggcgtcatgaattcagcacaaaagttctttgaagcagatgaacattggggtacggaatttgccaagctttactataatattgagggataggtgcatgacatgacaaaagatattgaatatctaacagctgattatgacaatgaaaagtcatctatccaaagtgtaatagatgcaatagagggtcaagacttcttagatgtagatacaacaatggatgatgcggtaagcgatgtcagttctttagacgaagatggcgcaatatcattaacaagtagtgtagtaggtccacaaggatctaaattaatggggtattatcaaaatgagttatatgattatgcatctcaattagattcgaaaatgaaagaaattattgacacgccatttatagaagatatagataaagcattcaaaggtataacgaatgttaaattggaaaatatactaattaaaaatggtggtggacatggtagagatacctatggggcttctgggaaaattgcaaagggagatgccaagaaaagtgacagcgatgtttatagcatcgatgaaatattaaaatcggatcaagaatttgtaaaagtaattgatcagcattacaaagaaatgaaaaaagaagataagaaattatctaaaagtgattttgaaaaaatgatgactcagggcgcttcttgtgattacatgacagtagctgaagcggaagagctagaggagcaaaagaaaaaagaagaagctatagagattgcagcactagctggtatggtagttttatcttgtattaatcctgttgctggagcagtagctattggtgcttattccgcttattcagcagcaaatgcagccacaggaaaaaatattgtaactggaagaaagctatctaaagaagaacgaatcatggaaggactttcgcttattccattgccaggtatgggcttcctcaaaggtgctgggaaaagtttaatgaaattaggcttcaaaggcggagaaaaatttgcagttaaaacaggattgcaaaagacaatgcaacaagcagttagtcgtatttcacctaaaatgggaatgatgaaaaacagtgtgttgaatcaatctcgtaactttgctcaaaatactcatgttggacaaatgctgagtaacatgcgtggtcaagcaactcatactgttcaacaaagtagaaattggattggacaacaagcacaaaatgtcaaacgaatagtgaataatggacttgataaagaaatagcacatccatttaaacaacaacttgcaccagcgggaatgggtggtataaaatttgctgaaacaactactttgagaaacatgggtcaaaacataaagcgtgctgttacaccacaaaatcacgtgacacatggtccaaaagatagtatggtgagaagtgaaggcaaacatagtataagtagccatgaaatgaattcatcaaagtatgttgaatcaccaaactacaccaaggttgaattcggagaacactatgcaagacttagacctaagaaactaaaggcgaatattgaatacacaacacctactggtcacatatatcgaaccgatcataaaggtcgcataaaagaagtttatgtagacaatctctctctaaaagatggggatcgtaatagccatgcacaaagaactgtggggggagaggatagattaccagacgatgatggaggtcacttaatcgctagaatgtttggtggttcaaaagacattgataaccttgtggcacaaagtaaatttatcaaccgtccatttaaggagaaaggtcattggtataatcttgagaaagagtggcaagagttcttaaactctgggaaagaggtgaaaaatattaaaatggaagtaaaatatagcggtaatagtcaaagaccgactatatttaaagttgaatatgaaattaatggtgaaagaaatattagaagaatattaaataagtagaggtgccaacatgacatttgaagagaagcttagcaaaatatacaatgaaattgcgaatgagattagcagtatgataccggtagagtgggaaaaagtatatacaatggcttatatagatgatggaggaggtgaagtattctttaattatactaaaccaggtagtgatgacttgaattattacaccaatatacctaaggagtataacatttctgtgcaagtatttgatgatttatggatggatttatatgatttatttgaggagttaagagatttatttaaagaagaagatttagaaccatggacatcatgcgaatttgattttacaagagaaggtgaattaaaagtttcatttgattatattgattggataaattcagaatttggtcaaataggtcgacaaaattactataagtatagaaaatttggaattttaccagaaacggaatatgaaattaataaagttaaagaaatcgagcaatatattaaagagctagaagaataaactatcttaatgtaagactaaacaataaagctttgtttagtctttttagcgtttaagtaaaaagcaatagataccgtaaagttgatgctcatcaaataataatataaagataattttaggtttttaaacttttaatcgaaaagaatctaagtttatagctttaaatacgtaatatgctatttaaaaaataatgtataggagatagatatgactactaaagaaaatattgatactcttcgaaagccaggtgcacaagccttaagtttagcatcattatttatgatacttttttcatgtctaactttcttttttggtttagattatgaaaggtttccaaattatttaaagataacgacaattatagaattaataattatcataattagtttacttcaatggattagatttatagatttcgaaaaggaaagcgcacagaaatataagaaaatatatgcccgatttttagttattataaatgtgctaactactatcaccgcagtatttgcaacatgtaacctttattattttgttgctgtacaaaatcattatgacctattcaattattggttgatgggtacgatttcaatcataattagttatttgttattagtaattggcggaatgttcacgttattaaaattacctaaagtaacaaaacgttggggtggtaaaactaaaacacatttcggtttattattaactgcgttgagctcatttatatatattgaaaaaattatcgaatatatattggttcctaatgtcgtagaatctaagtttataattattgtgagcatgttggttatcgctggagcacaatttgtggcatttcaatttattatgcaatacagtagattctatatttttgaattaaacactgaagatgatgactaaacaattttataaattctgtgaagtatacttatatataagataatcaacttcaacgtatatcaccatattattttatactcaatgatgtgaatggatttaagtggattgatattaaagtaaaagttatggaatattgaggtgtgaatatggagttcttattattaattgtcgtagccggactgtattatattatatatttaactgctgtgatgtattctgaaaaaatagtagtattgcctataatcatctatgccattgtgtttgtaataattggtatcacttatatctttataggcgacagctatgatcaattaacaaatttcaatgtgattttgtatatggggagtttgttttatgcatggatggctattagaaatctttggaacagaccactattactaaaatataagaacattacagatagttcaagtggaatagttaataaatctgaatacaattcagttgaaagcttacgtataaatattgaaatagctaagtataaagggattatttctttgatagtagctatagtactaacggtattaatgacattaaagtcaacacctcaaatcactgcagaaacacgtgacttaagtatctcatttttcatactcagcttatttatcattattatatttgcagtttgggatttgtttattagagttagaaaaggagcgtttgcttttgttgtaataaggccaatattatttagttgttggttatttattttgaatatgattttatcaagattattataattgtattacatataggtgtgggtaaatttttatttatgaaatgataaaaaagtatatactattaatatcttttttactataattataaatagttaaataaattgaaagacaaaataatgagtaggagttaatgagatggaaaaccaaaaacaaggcaatggcttaaaaattgcaacatgggtatttattgtattaacagtagttacaccgctatttggtattggaagtattgtttgtagtattaattataaaaaatacgatgctgaaaaaggttcgaagttattgcaaattgcaattatcgtaacaataattgcttttgttttaaatttattagcatatttaggtttaagataagtaaaacgaatttgaagaagcattaagcgacatttgggtgttgtttaatgctttttatttaacggaaataagtgtagagaataaattaatagtttaatcaagagatatttcgaacacataggggcgataacatgactttcgaagaaaaattaagtgaaatgtatagcgagattgcgaataagattagcagcatgataccggtagagtgggagcaagtatatgcaatggcatatgtaactgatcaagctggagaagtcatctttaattatactaaaccagatagtgatgaattaaattattattcagacatacctaaagattgcaatgtctcaaaagatatttttaagaattcatggtttaaagtttatcgaatgtttgatgagttaagagaaacttttaaagaagaagggcttgaaccatggacatcatgcgaatttgactttacaagagatggcaaattgaatgtatcttttgattatatagattggataaatacagagtttgatcaattgggccgtcaaaattattatatgtacaaaaaatttggggttataccagaaatggaatatgaaatggaagaagttaaagaaatcgaacaatatattaaagagcaagaagaagctgaacaatagaggtgataacatgactttcgaagagaaaataagcaaattatataatgagattgcgaatgagattagcagtatgataccggtagagtgggaaaaagtatatacaatggcttatatagatgatggaggaggtgaagtattctttaattatactaaaccaggtagtgatgacttgaattattacaccgatatacctaaggagtataacatctctgtgcaagtatttgatgatttatggatggatttatatgatttgtttgaggaattaagagatttatttaaagaagaagggcttgaaccatggacatcatgtgaatttgactttacaagcgaaggtaaattaaaagtttcatttgattatatagattggataaatacagagtttgatcaattaggccgtgaaaattattatatgtataaaaaatttggggttttaccagaaatggaatatgaaatggaagaaattaaagaaatcgatcaatatattaaagagcaagatgaagctgaaatataggggagataacatgactttcgaagagaaaataagcaaattatataatgagattgcgaatgagattagcagtatgataccggtagagtgggaaaaagtatatacaatggcttatatagatgatggaggaggtgaagtattctttaattatactaaaccaggaagtgaagatttgaattattataccgatatacctaaggagtataatgtttctgtgcaagtatttgatgatttatggatggatttatatgatttgtttaagaatttaagaaatttatttaaagaagaaggacttgaaccatggacatcatgtgaatttgactttacaagagacggcaaattgaatgtttcatttgattatattgattgggcgaattcagagtttggacaaatgggaagagaacattattacatgtataaaaaatttggaatttggcctgaaaaagaatatgccataaattgggtaaaaaaaataaaagattatgttaaagagcaagatgaagctgaactataggggcgataatatgactttcgaagaaaaactaagtcaaatgtacaatgaaattgcaaatgaaatcagtggaatgataccagttgaatgggaaaatatatatacaattgcctatgtaactgatcaaggtggagaggtcatttttaattatactaaaccaggtagcgatgaattgaattattacacatatatccctagagagtataatgtctctgaaaaagtattttatgatttgtggacggatttatatagattgtttaagaagttaagagaaacttttaaagaagaagggcttgaaccatggacatcaagtgaatttgactttacaagcgaaggtaaattaaaagtttcatttgattatattgattggataaatacagagtttgatcaattaggccgtgaaaactattatatgtataaaaagtttggtgttttaccagaaatggaatacgaaatggaagaagttaaagaaatcgagcaatatattaaagagcaagatgaagctgaactataggggcgataacatgactttcgaagaaaagctaagtcaaatgtacaatgaaattgcaaatgaaatcagtggaatgataccagtagaatgggaaaaagtatatacaattgcctacgtagatgatgaaggtggagaggttgtttttaattatactaaaccaggaagtgaagatttgaattattattcagatattcctaaagattgcaatgtctcaaaagatatttttaagaattcatggtttaaagtttatcgaatgtttgatgagttaagagaaacttttaaaaaagaagatttagaaccgtggacatcatgtgaatttgactttacaagaaagggaaatttaaaagtatcatttgattatatagattggattaaattaggttttggcccatcaggaaaggaaaactactatatgtacaaaaaatttggtattttaccagatatggaatatgaaatggaagaaattcgagcagtagagaagtatgttaaagagcaagagtagcagacatgttataaaagactgtgcaaaatcaccctcgttttacatttgattcaaagaagaaggtaaaagataagattatttgcaacttaaaaagtcaattagcttatcggtatccatacatcatggataaatgagttcaactaattaacaaatcacgatataaatttaaaattgtcattaattgaaaaggttattgtagtgtattttataaagttgatgtacatcgacttattttttaaaacttatatcaaaaaaatatgagaaaagtatatactattaaaatgttttttactataattataaatagttaaatatttgggaattaaataaatatataggaggcaatttttagagatacatagcaatgtaaaggtatcaaatagttatttcataatttattatgatgacataattttcagtagatagttgtaaattaacactgaaatagatgtttatattaagaagactttaatatcataattaatcaaaatcttgcgtcaaacatttaaacgaattttaagttgataacaattggcaaaacattgttcaaacatcacaatgataaagcatattatcagtattgtagtgtgtggaaaatgacagccatctaaggagaaaaatgatgaaaagaatattggtagtatttttaatgttagcaattatattggcaggttgttctaataaaggtgaaaagtatcaaaaagatattgataaagtgtacaaagaacagaatcaaatgaataaaattgcctcgaaagtacaaaacactattaaaacagacattaaacaagaagacagtaatacacatgtttataaagatggtaaagtcattgttattggtattcaattatataaagatcgtgaaaaaatgtattatttcgcatatgaaataaaagatggtaaggcagagattaatagagaaatagacccaattaagtatatgaaagaccataaagcagattatgaagatgaaaatgtagaagtggaaaaagattaacataggctttctttaaaacttttaaccagtttcaaaaagtaaatgagctttagcgacaataatttttaaaataaacacgatataaatttaaacatttatatataagaacacaaacgcaagtttgtaaataataataataaaggagtaagacaatggaaaaatcgatcaaaataatgacaataataggaattgttgttcagggtttagcaacggtatttagtttactattgatggttttagcagcatcaggtgtaatgactacagatgtgtcaacaacagttaatggtgaggttgacccagttgatgcagaaacagcagcagcaattttcactgtattattcttatccctattcatatttggaatcatttcaattattttaggtgcaatcggtatgtttaaagcatctaaaaacaaaaaaatgagtggtatattgttgattattggagctgtaataagtggtaacataattacatttgctttatggttaatcagtggtattaaactacttactaataacaagcctaaagatgaaataagcgacttatcataaacatcgtatattgaaatttcaagatttcttaagtaattaaataaagtgctctcttagaagtagattttcagtcaataactgcttttaagagagcattttgtatttgataatgctcatagcatcggataaaaatcattgacgaactttaaaaaaatacgttagacaatgcacttctaaatattaaaggcatcgactaacgcattgttcaaatatagttaattatttttataaaattgatgatgatcattcaagtaagcatagaataaacctataatgagtccgcctccaatatagttaccgataaaagccgcagcgatattcgaaatagctggtatgaagtgcaatgtatcaacttgataaattaaaccacccataaataagcaactgttgtaaacgacgtgttcataacccataaaggcgaatatggtaacaccgaacatcatgacaaacatttttgcgagtacatcgtcaatttgcatggcaataactaatgaaatattgataaagaaattggcgaagatcgctttcattaatatacttacaaaaccagtagacaacgttttatgctctataactgctgataactgatttaacatatctggcgtcattacatttgaaaaacgcatgaaactaaataaaatagcagcacctaaaatatttcctgcaaagcataataaaaatattttcaatactctagttggtttaattactttataatacaggcctacagtaaagtacatgaagttactggttagtagttcggagtttgtaaataaaatgagtactaacgcaaagctgaatgtaatggcactggccatattcacaatgcctggcggtaaatctggttcgtgtgttgctttaactgataatacgaagaccgtaataatcccgataataaatcctgccatcatcgcgcgtaataaataacgttttaaataaacgctttgtaatatatcttttgttcttatcgtttcgactacgttatttacccagtcgtccccataaaaaatcttatcccatttaatatgtttctccttcacaatgacatcctcacttttcatttgttaatcagagtatactatgaattgccttatttgtgaataatttcacaaaattaattttaaaaactaatatttttgaataacagctaggattttttaacaaatcatttattttaaaataatcaatagacagacggtatcactgaaaagtcatgaatttcatataaaaaagcctagtaacgatgggtcaatcattactaggcagtgagcatttattaagttgtcgcttgtttcggacggcgtataaatacatcgattatgaaaccgataatagcaaagagcatgaatggtacaagccaagctaaatcgatatctgctaaaggtaacatcataaacgatttcaaaataacaccgtgtaataagttgaaactatttagtatttgtaaaattgaaataatcaatgtaataacagttgcgagtcgataggcccaactgaatctgaatgtgctaaacatgttagcaaatgatatgagtacaagtgcaatcgacacgggatatattaaagtcaataatgggacagcaatttttaaaatcatttctaaaccaagtgttgtaaataagaaccctatgatagagaaaataagtgcgaatattttataagaaaacttaggtacgtgtttcttagtaaatgtggcgcaagcattgacgagtcctatacatgttgttaggcatgcaaggataaccgtcattccaaatacgaggttaccgaacgaaccaaataatcgtaatgagttgtacgtcaatatatctgtaccatctttaaagtttcctggagctgttgatgccccaacgtatgcaagtgcaaagtaaatcattccaagtaatatggctgcaataagacctgaaaagcagacatattttaaaattttcatgcgatctgtgaggcctttaaacttatagccattgacaatgactacggaaaaagctaacgcagcaacaagatccattgtaaaatagccttccaaacttcctgaaatgaaaggatgtgttatatatttatccttaggtgcacttagtgcagattcagggttgaaaatgacagcaatacttaatagagcgaccattaatagtaataacggtgttaataatttacctaaattatcaacgattttcgatggatttaaactaatccagtaaacgatggcaaaaaagattgctgcgaatataattaaagtccattggttatgcacaggtaaaatgtgtcttgtaccaatttcgtacgcgacatttgcagcacgtggaataccgtaaaatgctccgatagacatgtaaatcacgacagcaaaaataaacccgaaccatggatgtatacgattgcctacactttcaacaccttcatcataaaatgcaacaacaataacagtaataaaggggagtaatatgcctgtaagggcaaagcctagcataccaatccacatattttgacccgctgtatggccaagcatgggcgggaatattaaatttccggctccaaaaaatagtgaaaataacatgaggcccgaaataataacttgttttttcaatgtaatttccttcctaaaactagatattcataataatttaaaaaatctgaaaaataaaaacgttcttactttatctttaaatgacaatactatgattctattattttataaaaaagattgcaataataacgtcttgctattattggataatgacaattaaagtgtcgtttttatgaattaaaataggtgaaagtaagttggaaatacgttggagcgttgtgatttttatgagaaattgtatgagtgaggactgctatttataaaaggtaaactatggatgagtttatggttgttccaataggtaaataagagatagcacactgtacacataatgatacgtggatgagtgaatatgtctgataggaaggcctagtcactcaaatgaatttaagtttattacgtgataaatcacaaatctctctcatgtgataggtctcccattaaatcatgcttatatgaaatgttcacatatttgttagcttttcaagaaataatattaaatatcttttcatagtatagcaatattaaataaatgcatttataattttaactgtattttaaatattaatcatgaggtgataagatgaataaaatttcaaagtatattgcaatagcatcattatcggtagcggttacagtttcagcaccacaaacgacaaattctacagcgtttgccaaaagttctgctgaagttcaacaaacgcaacaagcttctataccagcatcacaaaaggcgaatcttggtaatcaaaatattatggcagtggcttggtatcaaaattcagctgaagcaaaagcattatatttacaaggttataacagtgcaaagacacagttagataaagagattaaaaagaataaaggtaaacataagttagctattgctttggatttagatgaaacagttttagataattctccatatcaaggctatgcatcaatacataataaacctttcccagaaggttggcatgaatgggtacaagctgctaaagctaaacctgtctatggcgcaaaagaattcttgaaatatgctgacaaaaaaggtgtcgatatctactatatttctgatagagataaagaaaaagatttaaaggcaacacaaaagaacttaaaacaacaaggtatccctcaagctaagaagagtcatattttactaaaaggtaaagatgataagagtaaagaatcacgcagacaaatggttcaaaaggatcataaacttgtcatgctatttggagataatttattagactttacagatccaaaagaagctacagctgaatctcgtgaagcattaattgaaaaacataaagacgatttcggtaagaaatatatcattttccctaacccaatgtatggtagttgggaagctacgatttacaacaataactataaagcaagtgacaaagcaaaagataaattacgtaaaaatgctattaagcaattcgatcctaaaacaggcgaagttaaataatatatgaattggacgtctacatgtacttaaaggtatatgtaggcgtttttaaattgatccttaattttaaatgtaccgtacaaaaataatagacaattaattgcattttccataaatttgcttttaatataaaaagttcgggtataatgaaggataagtgtatgtataacattacagagcgcaacacgacgtacgtgcatctaagaatataaacaatgtttaaatcatagtagtagggagagaaatgcatgtttttagcttggaatgaaatacggcgcaacaaattgaagtttggactaattattggtgtgttaacgatgattagttacttgctatttttattatctggattggcgaatggtcttatcaatatgaataaagaaggcattgataagtggcaagcagatgccattgttctaaataaagatgccaatcaaactgtgcaacaatctgtttttaacaagaaagatattgaaaataaatacaagaagcaagctactttgaagcaaacaggggaaattgtgtctaatggccatcaaaaagacaatgttttagtgttcggtgttgaaaagtcatcatttttagttccgagtttaatagaagggcataaagcgactaaagataatgaagtgttagctgatgaaacgcttaaaaataaaggatttaaaattggtgacacattatcactatctcaatcagatgaaaaattgcatatcgtaggttttacagaaagtgcaaaatataatgcgtcatcagtcattttcacgaatgacgctaccattgccaagatcaatcctagattgactggagataaaattaatgcagttgttgtacgtgatacaaattggaaagacaaaaaattaaaccaagagcttgaagcggtaagtattaatgactttattgaaaatttaccaggttataaaccacagaacttaacattaaactttatgatttcattcttatttgtcatttcagctacagttataggcattttcctatatgtcatgacattacaaaagacgagtttatttggcatattaaaagctcaaggatttacgaatggctatttggcgaatgtggtaatttcgcagacggtcatattagcactatttggtacggcatttggcttactgttaacaggcgttacaggtgcatttttacctgatgcagtacctgtcaaattcgatgtactaacattgctcgtatttgcaattgtgttaatgattgtctctgtattaggaagtttattctccattttaacaattagaaaaatagatccgttaaaggcgattgggtaggaggtgtagcaaatgttgaaatttgaaaatgtaacaaagtcatttaaagatgggaatcgtaacattgaagcggttaaagatacaaattttgagataaataaaggtgatattatagcattggttggaccttctggctctggtaaaagtacatttctaactatggcaggtgctttacaaacaccgacatctgggcacattttaatcaataaccaagatattacgacaatgaagcaaaaagcattggcaaaagttagaatgtctgaaataggttttattttacaagctacaaaccttgtaccatttttaacggtaaagcaacaatttacattattgaaaaagaaaaataagaatgttatgtctaatgaagactatcagcaacttatgtcacaattaggtctaacttcattgcttaataagttaccttcagaaatttcaggtggtcagaaacaacgtgtggcgatagccaaagcgttatatacgaatccgtcgattattttagcggatgaacctaccgcggcgttagatactgaaaatgcgattgaagtcattaaaattctacgtgatcaagccaaacaaagaaagaaagcatgtattattgttacacatgatgaacgacttaaagcatattgtgatcgttcatatcatatgaaagatggcgtccttaatcttgaaaatgaaacagtagaatagttttattaagccggtacatcatgtgccggtatttttatgtttatgtattatttgaataaactttcacattcaattaataataattattatcgaaaatcagaaatattccgtgaaatataatattttttgtagtaaaatggcctctaagtattcaatatttaaatatggggattgaatataaaattatcgtaatgggggtcaatggttatggatttattgataggtactttatttttatttttggtcttagtgatttttacattatttacatataaagcgcctaatggtatgcgtgccatgggagcattagctaatgcagcaatcgcaacatttttagtggaagcatttaataaatatgttggtggcgaagtattcggtattaaatttttagaagagctaggagacgctgcgggaggtctaggtggtgtcgctgccgctggattaacagcattagctatcggtgtgtcaccagtatatgcattagttatagcagccgcgtgcggtggtatggatttattaccaggtttctttgcgggttatatgattggatatgtgatgaaatatacagagaaatatgtgccggatggtgtcgacttaattggatcgattgtcatcttagcgccattagctcgtcttattgcagtattattaacgccagtagtgaatagtacattgattcgaattggtgatattatccaaagtagtacgaatacgaatccaattatcatgggtatcattttaggtggtattattacggttgtcggcacagcgccattgagttcaatggcattgacagcattattaggtttaacgggtgtacctatggctattggtgccatggcagcatttagttcggcatttatgaatgggacgctattccatcgcttaaaattaggtgatcgtaagtctacgattgcagtaagtattgaacctttatcacaagcagatattgtatcagccaatccaattccaatctatattacaaatttctttggtggtgcgattgctggtttaattattgctatgtcaggtttaattaacgatgcgacaggtacagctacaccgattgcaggatttttagttatgtttggatttaatcatccgacgacaattgtgatttatggtgtagtaatggcgattgtaggtgcgcttgcaggttatcttggttcaattgtatttaaaaaatatccaattgttactaagcaagacatgattaatcgaggtgcagtagacgcatagcatcatcatattgaatagtaaaaacaaataaaacatagtaacgtgattcagtcgatgtaacagtcgataatgagtcacgtttttttatagaaaaatacaagacataaaaatgtcataatttattgtcgacaaatatcatactgtataaacatttatcattttctcaagtaccttttacacgatggaatgaacttactttttacgaaattatgcgtattttataaacaaatatcattgatataacggtaaatgtaagcgtttacaacagaaataacagcatgctacgatatttttgtaaattcactgattcaagtattttaagtcaatatgaggagggatgttatgagcgattctgagaaagaaattttaaaaagaattaaagataatccgtttatttcacaacgtgaacttgctgaggcaattggattatctagacccagcgtagcaaacattatttcaggattaatacaaaaggaatatgttatgggaaaggcatatgttttaaatgaagattatcctattgtttgtattggcgcagcgaatgtagatcgtaagttttatgtgcataaaaatttagttgcagaaacatcaaatcctgtaacgtcaacacgctctattggtggcgtagcaagaaatattgctgagaacttaggtaggcttggcgaaacggtcgcttttttatctgctagtggacaagatagtgaatgggaaatgattaaacgattgtccacaccatttatgaatttggatcatgttcaacaatttgaaaatgcgagtacaggttcatatacagctttaattagtaaagaaggcgacatgacatatggcttagcagatatggaagtgtttgactacattacgcctgaatttttaattaagcgttcacacttattgaaaaaggctaagtgcattattgtagatttgaatttaggcaaagaggcattaaacttcttatgtgcctataccacgaaacatcaaatcaaattagttatcaccacggtttcttccccaaaaatgaaaaatatgcctgattcattacatgctattgattggattatcacgaataaagatgaaacagaaacatacttaaatttaaaaatagaatctactgatgatttaaaaatagctgctaaacgctggaatgatttaggtgttaaaaatgttattgtgacaaatggcgtgaaagaactcatttatcgaagtggtgaggaagaaatcattaagtcagttatgccatcaaatagtgtgaaagatgttacaggtgcaggcgattcattctgtgctgcagtagtgtatagctggttaaatgggatgtctactgaagatatattaattgctggtatggttaacgcaaagaaaacgatagaaacgaaatatacagttaggcaaaacctagatcaacagcaactttatcacgatatggaggattataaaaatggcaaatttacaaaagtatattgagtattctcgagaagttcagcaagcacgggagaacaatcaaccgattgtagcattagaatcaacaattatttcgcatggtatgccgtacccacaaaatgttgaaatggcaacaacagtagagcaaattatcaggaataatggtgccattccagcaaccatagccattatagatggcaaaattaaaattggtttagaaagcgaagatttagaaatactggcaactagtaaagacgttgctaaagtatctagaagggatttagcagaagttattgcgatgaagtgtgttggtgctactactgtagcgacgacgatgatatgtgctgcaatggctggtattcaattttttgttacaggaggtattgggggcgtccataaaggtgcagaacatacgatggacatttcagcagacttagaagaactgtctaaaacaaatgtcactgttatctgtgcaggtgccaaatcaattttagacttacctaagacgatggagtatttagaaacaaaaggcgttccagttattggatatcaaacgaatgaattgccagcattcttcactcgcgaaagcggtgttaagttaacaagttcggttgaaacgccagaacgacttgctgacattcatttaacaaaacagcagttaaatcttgaaggtggcattgttgttgctaatccaattccatatgagcatgccttatcaaaagcatatattgaggcaatcataaatgaagctgttgttgaagcggaaaatcaaggtattaaaggtaaggacgccacaccgttcttgttagggaaaattgtagaaaaaacgaatggtaaaagtttagcagcaaatataaaacttgttgaaaacaatgcggcgttgggtgctaaaattgctgtcgctgttaataaattattgtaggtgatgatacatgaatattttattcgctatcacagggatagcatttgcactatttgttgcgtttttattcagttttgatcgtaaaaaaatagacttcaaaaagacgttaataatgatatttattcaagtgttgatcgtgttatttatgatgaacacaacgattggtttgacaattttaactgcactaggttcattttttgaagggctaataaatattagtaaagcaggcataaattttgtttttggagatatacaaaataaaaatggctttacgttctttttaaacgtattactgccattagtttttatttctgtattaataggcatctttaattatattaaggtattaccatttattatcaaatatgtaggtatcgctattaataaaataactagaatggggcgcttagaaagttattttgctatttcaacagcaatgtttgggcaaccagaagtatatttaacaataaaagatattattccaagattatctagagcgaaattatatacaattgcgacgtctggtatgagtgctgttagtatggcaatgctaggttcatatatgcagatgattgaacccaagttcgtagttacagcagtaatgttaaatatttttagtgcgcttatcatcgccagtgtaatcaatccctataaatctgatgatactgatgttgaaattgataacttaacgaaatccacagaaactaaaacattgaatggaaaaacaggaaaacctaagaaagttgcctttttccaaatgattggtgatagtgcgatggatgggtttaaaatcgctgttgtagtagccgtaatgttgttagcatttatttcattaatggaagcaattaatatcatgtttggtagtgttggtttgaactttaaacagcttattggctatgtgtttgcaccaatcgcattcttaatggggattccatggagcgaagctgttccagctggctctttaatggcgactaaattaattacaaatgagtttgtagcaatgcttgattttaaaaatgtcctgggtgatgtatcagctcgaacacaaggtatcatttcagtttacttagtaagcttcgctaattttggtacggttggtatcatcgtaggttcaattaaaggcattagtgataaacaaggagaaaaagttgcatcctttgcaatgaggttgctacttggttcaactctagcttcaatcatttcaggatcaatcattggcttagtattgtaaatgaatcgaagtacctaaattaaattcatggcaaagctaaaccccgtcaccaagttggcgcaacagcgcatcataacttagtgacggggttttatcataacaatctactttttcgtagccgtttttgaaatgtatgttgatggtttatctttttcaaaaattgttaatcccgttatatcttttttatgttttgaagggacaatgaagctaagtatataagcaaagacaaaagcaactgtaaatgaaatggtagatacatagaaaggtgagttacctttgccaacaccattatagacataagcaaagatgatacccaatattaatccacaaataacaccgaatgtattcgtacgtttagtgaaaataccaactgcaaatacaccagccaatggaacgccgaataatccagtcacaaacaagaataaatcccataagtcatttgaattagaagcaattaagtatagtgacattccaaaaccgaaaatacctgcaatgataataatgaaacgtgcaaagttaacttcgtgtcgctcgctaccttttccgaagaagcgttgcttaatgtcgattgaaatacaagcagatatagaatttaaactagatgaaatggtagactgtgcagcggcgaaaatggctgcaataagtaatcctgctacaaatggtggcatctcagtcaaaatgaaatatggcactacagatgatgtattgaagccttttggtaaaacagcttcatgtgtataaaatgaatacagcattgtacccataccataaaataagggtgctgaaattaaagctaggataccatttgtccataacgatttatttgtttcttttaaactatcagaagcttgataacgctgcacgacgtcttgactcgctgtgtattgatacaagttgttgaaaatatttcctaggaaaataattggaatggcagctgccgcagtatttagtttccaattgtctgcactaattaattttttgtgctcaatcgcatctgcaaagacagtgccgaaaccgcctttaatgttcacaacacctagaataataataactaaagcgccgcctaataaaatgacgccttgaatgaaatcactccaaaccacaccttcgaaaccacctaaaaatgtatataaaatacatagtaaaccaacgagtgatgcaacgatataagggttcatgtctgatacagatgtgattgctaatgttggtaagtagataacaattgcaacacgccctaaatggtaaacgacaaataataatgagccaatgacacgtatgctagggccaaatctagcttctaaatattcatatgcagatgttacctttaactttttaaagaaagggacatagaaataaataagtaatggaataattgcgacgatagcaatgttaccagcgatatatgaccaatctgttaaaaatgctttctctggtgtcgacataaatgtaatcgcacttaacgtagtagcataaattgaaaagccaactacccaagatggcaagcgaccacttgcggtaaagaaactattggtactttggctcgcgcgcttggtaaaataaacgccaatgaacaacatagctagtagataaatgataacggcaacccagtttagtgtgccaaatccaacttctttcatgggcaacatcccctttacaatgtattgattctttgatgtctataaatcgtattttgcaatgagttgatctaatgtttgtcgatgtgcttcgttaaaaggtttgaaaggtcttttcggtaatcctgcatcaatgccacgatgacgtaatatttctttcaatgttggataaatccccattgataacactgtttcgataatgtcgtttgaatcatgttgcagttggtaagcttcttgaatttgaccttgtcgtgctaagtcgaagatttttcttgcacggcgaccattaacgttatatgtagaaccaattgcaccatctacgccagaaatcgtagcttgaactaacatttcatcaaagccagataagattaatttgtctgggaatgcttttctaatacgttcgagtaggaagaagtttggcgctgtatatttaacaccaacaattttttcatgattaaatagctcgctgaattgttcaatagaaatattcacacctgttaaatctggtattgcataaataatcatattgttctgagttgcttcgataatatcgaaatagtaatctctaatttcttcaaaagtaaatggatagtagaatggtgttacggcagaaagtgcatcataaccgagttctgtggcatattttccaagttcaatggcttcatttaaatctaacgaacctacttgagcaatcaatttcactttatccccaactgcctctttggcaaccttgaaaacttgcttcttctgctctgtatttaataaaaagttttcgcctgagctaccatttacataaagaccgtctaattcttcagtttcaatggcattttgagcaatttgtttaagtccttgttcatttacttgaccattttcatcaaaaggaacgagtaacgctgcatataaaccttttaaatctttgttcattatgaagtccctccaaaaatcatttgataatatagtttacagctataattgtaaacgctatcataaaatgtaacaatatctttttgaaaattgtagtcatatttatgtataattaatgaaaatgtttttcaaaatcaatagaaatggagtgagtaaggtgtattacatcgcaatcgatattggaggcactcaaattaaatcggcagttattgataagcaattgaatatgtttgactatcaacaaatatcaacgccggacaacaaaagtgagcttattactgacaaagtatatgagattgtaacaggatatatgaagcaatatcagttgatccaacctgtcataggtatttcatcagcaggcgttgttgatgaacaaaaaggcgaaattgtatacgcagggccaaccattccgaattataaaggtactaattttaagcgattattaaaatcactgtctccttatgtcaaagtaaaaaatgatgtaaacgctgcattactaggcgaattgaaattacatcaatatcaagcagaacggatcttttgtatgacgcttggtacaggcattgggggtgcgtacaagaataatcaaggtcatattgataatggtgagcttcataaggcaaatgaagttgggtatttattgtatcgtccaactgaaaatacaacgtttgagcaacgtgctgcaacgagtgcattgaaaaagcgcatgattgccggaggatttacgagaagcacacatgtgccagtattgtttgaagcagctgaagaaggtgatgatattgcaaaacaaatattgaatgagtgggcagaagatgtagcagaagggattgcccaaatacaggtcatgtatgatccagggcttatattaattgggggcggtatatctgaacaaggagataatctcattaaatatatcgagccgaaagttgcacactatttaccaaaagactatgtttatgcaccaatacaaacgactaagagtaaaaatgatgcagcattatatggctgtttgcaatgatagttgaaagaaggagtcattctaaaatagaatttgaaaccgttacgagagatgagagctgttgttagttccacacatcacactctatctaggaccaatctaaactatatcaaccaacagtgtgccacgggcaaattaaattgaagaagctgagatattaaaattttagaaaatgtaaaaaaatatttggtattgaaattaaaaaagcacctagcaactcgttgggacaatcacgatgattgtctacagttgcaggtggatttgaatatactactagttatttgttgtctaggataatagatttagtatgttgataagtttgactcagattcgtattttctaataaatgataactcacgatatcgattaaaaagagtgtcgcaatttgtgtgttgataaattgatggtcggtattacgcgattgatccgttgttaaaagtactaaatctgcacaatctgtaagtttactaccttcaaaatttgtgatggcaacgacatatgcaccatgagatttggcgacttccgctgcagaaattaattccgaagtattaccactatttgacatagcaataaacatatccgaatgagatagtagggatgccgatattttcattaaatgtgaatcggtagtaacattaccttttagccccatacgaatcatacgataataaaattcagtcgctgataaaccagagctacctagtccagcaaagagtatatgtcgacttgattgaagtttgtcgataaaggtttggataatgtcgttatcaataaattcaccagtttgttgaatgatttgttgatgatatttatgaattctttgaataattgggctattttcaataactgtctctgtcatttcttgttgaatattaaattttaaatcttggaaattctcataatccagcttatgactaaagcgtgtcatcgttgctggtgatgtaccaatcgcatgggctaaggagttaatcgttgaaaaggcatcgctataaccattttgtcttatataattgacgatgcgtttatcagtttttgtaaataaatgttgataacgttgaacacgattctcaaatttcattgtgtcaccccttcatcttaatgattactattatatatgaaaaatattttcaagatagtaaaaagcattgataaaaattatcttaatgatatattgtaaatgactttacgtgaaaaaacgacttatggagtgaggaataatgttaccacatggattaatagtatcttgtcaggcactaccagatgaaccattgcattcatcttttattatgtcgaaaatggcattagctgcgtatgaaggtggtgctgttggtattcgcgcaaatactaaggaagacattttagcaattaaagaaacggtagatttaccagttattggcattgtgaaacgtgactatgatcactcagatgttttcattactgcaacgtcaaaagaagttgatgaactgatagaaagccaatgtgaagtcattgcattggatgcaacgttacagcaacgtccgaaagaaacgttagacgaattagtatcatatattagaacacatgcaccgaacgttgaaatcatggctgatatcgcgaccgttgaagaagctaaaaatgccgcacgacttggctttgattatattggcacgacgttacatggctatactagttatacgcaaggacaattactttatcaaaatgacttccaatttttaaaagatgtactacaaagtgttgatgcaaaagttattgcggaaggtaatgtcattacaccggatatgtataaacgtgtgatggacttaggcgttcattgttcagtcgttggtggtgcgataacacgaccaaaagaaattacgaaacgttttgttcaaattatggaagattaaatgataacgataaaaaaacgagatgaccatcattaattaaaggcacctaattatcttaggtggctgaatgaatgtaatgggttcatctcgttttgtttgtttatgatagtgattttattttcaactttatccaaaaataagtaaagcgacggggatggtgattaatagcgacaacgccacgcgtaaaaaccaaatgatgatgagtttccagacaggtattttaatttcagttgctagtatacatggcactaatgctgagaaaaagataatggctgatacgcttactacaccgacgacaaatttagtactcattgcagctttagttactaacaaagatggtagaaacatctctacaatagaaatcgctgacgcttttgctagtaaagcctgatcagcaattgggaaaatataaataaatggatagaagatatagccaagccaatcaatgaatggtgtatagttcgctacaatcagtcctaaaaaaccaatcgataatatagaaggtaaaataccaacagtcatttctaaaccgtctttcaaattgtcccaaacgttcttcacgagagatggtgttaatgcattttgtttcatcgcctctgcatatgcagttttcagtctgcttccttcaatagcaacttcttgttctccttcttgtccgttataatattctgttgattcattgctgattggcggtagccatgcagtaattgcagtcacgacaaatgtgatgactaaagttatccaaaagtataaattccaatgcggcattaatcctaaagttttagcaacgataatcataaaagttgctgaaactgttgaaaagccagtcgcaataatcgtggcttctcgtttgttgtacatcccttgcttatagacacgattagtaatcaataatcctaaggaataactgccgacaaacgaagccactgcatcgacagcggattttcctggtgttttaaaaataggtctcataataggctccatataaacaccgacaaattctaataagccatagcccactaataaagaaagcgcaattgcacctactggaattaagatacttaatggcatcattaatttttcaaacaaaaacggaccatagttagctttaaatagtattgatggaccgattttaaatacatacattataccgatcattgcacctgcaactttaaataatgtaatgaccaagtttgtgattgaagtcataaaagtacgtctcactattggtaacgctgtaccaattaaaatcataatcagtgcaacatagggcataagtggacctatgattgagcgaatggctagatgaacatgatcgacgaaaatagtgttgttaccattaatcgtaaaaggaataaagaaacatagtatgcccactaaactatagacaaaaaaacgccatgcacttggttgttgtgcattagaatgatattgattcattaaagcaacccctttgtttaaatgaatacacaaaactgtatgatgcatcttccccttaatgagatgaatcattattttaatttagaaaaatctgaaaacttactataattgtatagtttgaattattttcataccaatacaaattaactaattatatatagattgaaactatattacttaataaaatatttatcttaaatgttgttgtgttgattcaacaccacaactaaaagtgtttataaattatttggaaatacacatatttgtaaatgattagtatcgatttaatatcgtattattaaatttttattaattttgtagtcttaatcaaaaaataatatatgtcatgttatattgaaggtgcagttgtttttcattctcaagagggggtcaaaaaaatacttttgaggtgattatatgttaagaggacaagaagaaagaaagtatagtattagaaagtattcaataggcgtggtgtcagtgttagcggctacaatgtttgttgtgtcatcacatgaagcacaagcctcggaaaaaacatcaactaatgcagcggcacaaaaagaaacactaaatcaaccgggagaacaagggaatgcgataacgtcacatcaaatgcagtcaggaaagcaattagacgatatgcataaagagaatggtaaaagtggaacagtgacagaaggtaaagatacgcttcaatcatcgaagcatcaatcaacacaaaatagtaaaacaatcagaacgcaaaatgataatcaagtaaagcaagattctgaacgacaaggttctaaacagtcacaccaaaataatgcgactaataatactgaacgtcaaaatgatcaggttcaaaatacccatcatgctgaacgtaatggatcacaatcgacaacgtcacaatcgaatgatgttgataaatcacaaccatccattccggcacaaaaggtaatacccaatcatgataaagcagcaccaacttcaactacacccccgtctaatgataaaactgcacctaaatcaacaaaagcacaagatgcaaccacggacaaacatccaaatcaacaagatacacatcaacctgcgcatcaaatcatagatgcaaagcaagatgatactgttcgccaaagtgaacagaaaccacaagttggcgatttaagtaaacatatcgatggtcaaaattccccagagaaaccgacagataaaaatactgataataaacaactaatcaaagatgcgcttcaagcgcctaaaacacgttcgactacaaatgcagcagcagatgctaaaaaggttcgaccacttaaagcgaatcaagtacaaccacttaacaaatatccagttgtttttgtacatggatttttaggattagtaggcgataatgcacctgctttatatccaaattattggggtggaaataaatttaaagttatcgaagaattgagaaagcaaggctataatgtacatcaagcaagtgtaagtgcatttggtagtaactatgatcgcgctgtagaactttattattacattaaaggtggtcgcgtagattatggcgcagcacatgcagctaaatacggacatgagcgctatggtaagacttataaaggaatcatgcctaattgggaacctggtaaaaaggtacatcttgtagggcatagtatgggtggtcaaacaattcgtttaatggaagagtttttaagaaatggtaacaaagaagaaattgcctatcataaagcgcatggtggagaaatatcaccattattcactggtggtcataacaatatggttgcatcaatcacaacattagcaacaccacataatggttcacaagcagctgataagtttggaaatacagaagctgttagaaaaatcatgttcgctttaaatcgatttatgggtaacaagtattcgaatatcgatttaggattaacgcaatggggctttaaacaattaccaaatgagagttacattgactatataaaacgcgttagtaaaagcaaaatttggacatcagacgacaatgctgcctatgatttaacgttagatggctctgcaaaattgaacaacatgacaagtatgaatcctaatattacgtatacgacttatacaggtgtatcatctcatactggtccattaggttatgaaaatcctgatttaggtacatttttcttaatggctacaacgagtagaattattggtcatgatgcaagagaagaatggcgtaaaaatgatggtgtcgtaccagtgatttcgtcattacatccgtccaatcaaccatttgttaatgttacgaatgatgaacctgccacacgcagaggtatctggcaagttaaaccaatcatacaaggatgggatcatgtcgattttatcggtgtggacttcctggatttcaaacgtaaaggtgcagaacttgccaacttctatacaggtattataaatgacttgttgcgtgttgaagcgactgaaagtaaaggaacacaattgaaagcaagttaaattcatcttctgaatttaatatgctatgtaaatcgtgctgttatcatggcacatcagatataagtagcatcacagtgttgaatttaaaaatagtaaagtgaaataaagcgcctgtctcattagcgaaaactaaagggacaggcgtatctgtttatgagcttaataaattgtatgaataatatggttgatcgaataactgtttatcatgatgataaattgagttttttaaaataatgatatattacatcattgttatagcgtttaagaaatcaacaactttacgataaatagtgattgcttcgtcattaggtctacgatcaaaatcatgctcgtttttattcacgcgttcaaatgttgaatgtggaacatgattcatgatatgttcgctttcctcaacgggaacatcataatcgccattacaatgcgcaatgaaaacaggtggaagtgttttaagttcatctggtgcaatattatattttgaattagtataatcagcaatgttaatcatatttatccatttacctgtgccacgtgcataaacgtagattaaaaaacgttgtgcgatttgatcttgaacaaccggtgttggtgaagtgagttgtgcaatcattgtttcgtttacgctttgagctatttttgcgtaataactattagttgttttaaaaggttcagtgttgatgcgactataaccataaaaatcaataacaccatcaatatctctgtctcgtgcaattaatagacttaaatatgcacctgatgatctgccaaaggtaaaaatagggcaattagaatattgtgattgaatcgcatcgaatgatgcgtagacatcctcaataatgcaatcgagacttacttctggtaataaacgataacttagttgaattaaatcgtaatgttccgtaaggatatcgatatactgtggggataaatcgttagctttaccgaacattaatccaccaccgtggatgtagacaatagcgccttttgttggttgattttttgctttaataattgtgtaaggtaatgcaaatgcatctttagtaattactttatctttaatttcagtcacgatttaataggctccttatttttgatattgatgtcattataacactgtcttaaatttccatgaaaaatagtcttaagacgatgagtcatgataattctgttccaattgacgtaaagcgtcacgggtatgcttctttagaccttccccataatccatcattttaacaatatctttaaaagcagcatgtggaatggctaaatcttctaaatctgccatagaaaattcaagattgatatcatgtggtcgctgttcagcaagtttatgcacaaagtcaggttctgtgacaaaaggcgaagacatgccgaccatatctgcatgttgtaaagcatctaaagcagactctggagaattaatcccgccacttgcaattaaagggatacgacctgctaaatgttcatagacaatttggttaactggtcgaccgaaatgatcacctggtgtacgagacgtattttgataaatatgtcgaccccagctagcgattgctaagtattggatgtttgaaacgtccatgacccaattgattaattggttgaactcgtcaatggtatatcctaaatcactgcctctggtttcttctggcgttgctcgaaatcctaaaataaaattgtcaggtgcttctttatcaatcacttcttgtaccgcacgcataacttctaaacataatcttgcacgattttttaatgagtcggcaccgtaatggtctgtacgtttattcgaaaaagttgagaaaaatgtttgaatcagcaaacgttgtgcaatcgaaatttccacaccatcaaaacctgctttaatcgcgcgtaatgtagcatcgcgatactgctgaatgatgctattgattttctcatgagacatggcgataacatcgtgttcaatcggtgaatgcaatgtcatagggcttggtccatacacctttccaaaatttaaaatggcttgatttgaaaaacgaccagcatgcgctagctggataatagcgaggctaccatgttgtttcatcgtagatgccatgttagttaatccagggatacaagcatcatgatcaatattaaagccatattcaaacaattgaccataaggttcaatgtaagcagcgccggtgacttgcattccagctgaattagagcgacgtgcagcataagccaagtcttcttttgtaatatagccttcttttgttgatgtgtttacggtcattggtgataatacaaagcgattcgaaattttgatgccattaggtaagtggattgattgtaaaagtggtttgtatcggtacatactatgattccttttctattcaatattgttttcaaagtaccatggaaagaatgaataatcaatgatgaacagtcttgatagaatagaattggtacatggaaagtatttttaaaattaaactaatgaatggcatttgtaggtctgaaaatatgaatatgaaaaagaaaaataaaggcgaaaagatataaaagttaattgaaaaacgttatcatatacgtgggtatatgaagagggaatggtattaagaacgctaaaatgttatgtcggtttgacatgacaggataagtttggagatgacggattggttaaattaagcgtattagactatgccttaatagatgaaggtaaggatgcacaaaaggcattgcaagattcagtgacacttgcaaaattagcagatcgacttggctttaagcgaatttggtttacggaacatcataatgtaccagcgtttgcgtgtagtagtccagaacttttgatgatgcatacattggcgcagacaaatcacatacgagttggctctggtggtgtgatgctgccgcactatcgaccttataaaattgctgagcattttagaatgatggcagcgttatatccaaatcgtattgatttaggtattggtaataatccaggtactactatggtaaagcaagctttagatggaataaatcctacatatgatagttacgatgaatcgatttcgttattacgtgattatcttacaataaaggataaaccaagtgcgcatacgttaggtgtccaaccacacattgatcattttccagaaatgtggttattaagtagtagcgcaacatctgccaaaatagctgccgaactaggtatagggctttctgttggaacatttttgctaccagatataaatgcgatacatacagcgaaggataacattgatatttacaaaaaacatttccaagcatcaacgattaaaatggacgcaaaggtgatggcatctgtatttgtcattgtagctgataacgaagcggaagtagcagcattacaacatgccttagatgtttggttattaggtaaattacaatttgcagaatttgaagattttccttcagtagacacagcacaaaagtataagcttaatgatcgagacaaagagatgattcaagcacatcaagcacgcatcattgcaggtacacaagaaaaggttaaagcacaattagatgatttcattgctacgtttgaagttgatgaggtgttagtagcaccgcttattccaggtattgaacagcgttgtaaaacattaaaattactcgcggaaatttatttgtagcattttaaatagaagagaaaggatgaagataagatgaaaaagttagccaattatttatgggtagaaaaagtaggagatttgtatgtgtttagtatgacacctgaattgcaagatgatattgggacagtaggttatgttgaattcgtaagtccagatgaagttaaagtggatgatgaaattgtgagtatcgaagcatcgaaaacggtcattgatgtgcaaacgccattgtcaggaacgattattgagcgaaatacaaaagcggaagaagaaccgacaattttaaactctgaaaaaccagaagaaaattggttgttcaaattggatgatgtcgataaagaagcattcctagcattaccggaggcttaaatggaaacgttaaaatcaaataaagcgagacttgaatatttaatcaatgatatgcatcgagagagaaatgacaatgacgtattggtaatgccatcttcatttgaagatttgtgggaattatatcgaggcttagcaaatgtcagaccggcattacctgtaagtgatgaatatttagctgtacaagatgctatgttaagtgatttgaatcgtcaacatgttacggatttgaaggatttgaagccgataaaaggtgacaatatctttgtttggcaaggtgatatcacgacgttaaaaatcgatgctattgttaatgctgcaaatagtcgttttctaggatgtatgcaagctaatcatgactgcattgataatattattcatacaaaagcgggtgttcaagttcgacttgattgtgcagagatcattcgacaacaagggcgcaatgaaggtgtaggtaaagccaaaataacacgtggatataatttgccagcaaagtatataattcatacggttggtccgcaaatacgtcgattgcctgtttcaaagatgaatcaggacttgttagctaaatgttatcttagctgtcttaaattggctgatcaacatagtttaaatcatgtcgctttttgctgtatatctacaggtgtatttgcttttcctcaagatgaagcagcagaaattgctgttcgaacagtagaaagctatctcaaagaaacaaattcaacattgaaagtcgtgttcaatgtatttacagataaggatttacaactgtataaggaggcatttaaccgtgatgcagagtagtaagtggaatgcaatgtctctgttaatggatgacaagacaaagcaggctgaagtattgcgtactgcgattgatgaagcagatgcgatagtgattggaattggtgcaggcatgtctgcatctgacggatttacatatgtaggagagcgttttacggaaaatttcccagattttattgaaaaatatcgcttctttgatatgttgcaagcgagtttacatccttatggcagttggcaagagtattgggcatttgagagtcgttttattacattaaactatttagatcaacctgtaggtcagtcttacctcgctttaaaatccttggtggaaggtaaacagtaccacattataactacgaatgcagataatgctttcgatgtagctgattatgatatgactcatgtatttcatatacaaggggagtatatactgcaacagtgtagtcagcattgtcatgctcaaacgtatcgcaatgatgatttaattcgtaaaatggttgttgcgcaacaagatatgcttataccttgggagatgattccaagatgtccaaaatgtgatgccccaatggaagtgaataaacgtaaagcggaagttgggatggttgaagatgctgaatttcatgcgcaactacatcgttataatgcttttctagagcaacatcaagatgataaagtgttgtatttggaaattggaattggttatactacaccacaatttgtgaagcatccttttcagcgtatgacacgtaaaaatgaaaatgccctttatatgacgatgaataaaaaggcatatcgcattccgaattcaattcaagaacgtaccatacatttaactgaggatatctcaacattgattacagcagcactccggaacgacagcacaacgaaaaataacaacattggagagacagaagatgtacttaatagaaccgattagaaatggagaatatattactgatggtgcgattgcactcgctatgcaagtttatgttaaccagcatatctttttagatgaagatattttattcccttattattgtgatccaaaagtggaaattggacgttttcaaaatactgctatagaagtgaatcaagattatatagataaacacagtattcaagtagttcgccgagatactggtggtggcgctgtgtatgttgataaaggtgccgttaatatgtgttgtattttagaacaagacacttcaatttatggtgattttcaacgattttatcaaccagctataaaggcgttgcatacattaggtgcaacagatgtggtacaaagcggtagaaatgatttaacattgaatggtaaaaaagtgtcaggcgccgcaatgacattaatgaataatcgtatttatggcggttattcgctattacttgatgttaattatgaagcaatggataaagtgttaaagcctaatcgcaaaaagattgcatcgaaagggattaaatctgtgcgcgcacgtgttggtcatcttagagaagcactggatgaaaagtatcgtgatataaccattgaagaatttaaaaatttaatggtgacgcagattttgggaatcgatgacattaaagaggcgaaacgatatgaattaacggatgcagattgggaagcgattgatgaattagctgataaaaagtataaaaattgggattggaattatggcaagtcacccaaatatgaatacaatcgaagtgaaagattatcttcaggtacggtagacataacaatttctgttgaacaaaatcgtatcgcagattgtcgtatttatggggatttctttggacaaggtgatataaaagatgtggaagaagcattacaaggaacaaaaatgacaagagaagatttaacgcatcagttaaagcaattagacatcgtttattattttggcaatgttacggtagaagcattagtggatatgattttaagttaatattgttattttatgtatgctgaatcattggaagtgtttgcttgctcttgaaaaggtgacaatagtgtttggtgaaggttgaacatatgagtggaaattattgcctttaactattcaaagtatgatatatatatggtttttgtttctaaatgattgggtatttgaaaatagatgagtttaatattttaaggaatataatgatgtttacttttataattcatatagaatattaagcaatataagtctgttgatatatacaaaatataatgactgctataatgagtaatcaatagacacaaagaggagattatgtgatgaataataaagtattagtaaccggtggtacagggtttgttggcatgcgaattatttcacgattattagaacaaggttatgacgtacaaacgacgatacgtgatttaagtaaagctgataaagtaattaaaacaatgcaagacaatggcatttccacagagcgattaatgtttgtcgaagcggatttatcacaagatgaacattgggatgaagcaatgaaagattgcaagtatgtcttgagtgtagcatctccggtgtttttcggtaaaacagacgatgcagaagtgatggcgaagcctgcaattgaaggtatacaacgtattttaagagctgcagaacatgcgggtgttaaacgtgtggtaatgactgcaaactttggtgcagttggttttagtaataaagataaaaattcaatcacaaatgaaagtcattggacaaatgaagatgaaccaggcttatcagtatatgaaaaatcaaaattgttagctgaaaaggcagcgtgggattttgttgagaatgaaaatacaacagtagaatttgccacaatcaatccagttgcaatttttgggccatcattagatgcacacgtttcaggaagctttcatttattagaaaatttattgaatggttcaatgaaacgtgtaccgcaaattccgttaaatgttgttgatgtgagagacgtagctgaactgcacattttggcaatgacaaatgaacaagctaatggcaagcgatttattgcgacggctgatggacaaattaatttgttggaaattgcaaaattaattaaagaaaagagacctgaaatagctcaaaaagtttctactaaaaaattaccagactttattttgagtctaggtgctaaatttaatcatcaagctaaagaaggtaaacttttattagatatgaaccgcaatgtaagtaacgaacgtgcaaaaacattacttggttgggaaccgattgcgacacaagaagaagcaattttagcagctgtcgatagtatggctaagtatcatttaatataatacaaaacaccgtccataagtaagtggctttcctcttgataaaaggggcattcactcaatatgtgacggtgttttatatttctacgttaacactattgctgttctttttgacggccttttaataaaattgttgtcgcacctacgataataataaatagaatcgcaccaaataatcccatatattttactgcgttaccgaacacgataccgacagctaaaaagtctgtatctgagaatgttgttgcagcaccacctaattcgcctaaaaatggcaagaataataatggtaaaaacgtgattaggataccatttagagcggcgccagcaatagcacctttaataccgcctcttgcattaccgaatacagcagccgttgcacctaagaagaagtgtgcaactacgccaggtaaaatgacgacgccaccaaataagaataagataaacataccgatgacacctgtaataaagctgacaaagaatccaattaatactgcattttgtgcataagggaacacaatagggcagtctaatgcaggtttagaatttggtacaagcttttcagaaattcctttaaatgctgggacgatttcagctaagattaaacgaacgcccgttaaaataataaatacaccagcagcaaatgtcacaccttgaattaatgaaaagacaataaagttttgaccatcactaatagattcgtgtacataactaacgcccgcaaataagcatgcgatgaagtaaagtaatgccatcgtaatcgagatactaattgtactttctcgtaagaaacttaagccttttggaaatttaatctcttccgttgatttagacttacctttgaataattgacctacagcacctgcggcaaagtaactgattgagccaaaatgacctaaagctacttggtcattccctgtaatttttcgcatcgtaggttggagtaatgcaggtaatactgccatgattaatcctaatacgagtgcgccgataacaatcgttagccagcctttaatatgactgactgttaaaatgattgctaaaaacgcagccatgtaaaatgtatgatgacctgttaaaaagatatattttaaattagtgaagcgggcaattaaaatattaacaatcatgccacagaccatgatgagtgcagctgttgttccaaaatcttttaaggctagtgagacgatagcttcgttgttaggtacgataccttgcacaccaaatgcgtgttggaatattttgccgaatggttcaagagatcgaacgacgacatcagcacctgcacttaaaattaagaagcctaatatcgttttaatggttcctgaagtgatcgttgcggcaggttttttctgaacgattaaacctataaaggcaatcagtgcaacaagaatggctggttgacttaaaatatcgactataaaattaaggattgcttgcataggtcgtacctcctttaaatcatgttaagttgttgtaatttttctgagagcttttgttgtaattcagctttatctaaaatattatcaagaactaagacatcccctagacgttcggcattttcagctaaatctctaccacaaataaacaagtcagccatctctggacttgctgtcataatgtcactatgttcaacttcgatatcagatggtgcattaagttgcctaagtgcttcttgtgcgttcatttctaccataaaactacttcctaaaccgtggccacatactactaaaattttcatattaatcatgctcctttaaaatgtttttaatgtcttgtgcatttgttgcagttaatagttgctggactgtttggttatcgcccagtacggttgctaaattttgtaatacagataagtgtgaatgattgtcgatggcactcaatacaaaaatgagagatgcgtagtgatcttcatcacaaaatgccacatgttgattcaactttaatagacttaaaccaacttgatgtacgtcattgttcggtcttgcatgtgcaattgcaatttcaggtgcgataacgatataaggtccaagttcattaacgctatcaatcattgcttgaacatagccttgttcaataatttgttcttgtagtaatggctgagaagctatagttatagcttcagtccaatcatttacttgttcttttacaatgatgcgtgttgttgacaaaatgtctaatgacacgttattaagcctcctttgtcatagttaaagcaatgtgttgtttaattttaaaaatattcccatctaagaaatcttgtcgatataagtcgttgcttaagcattcgcttaactgtcccaatgcctttaaatgtgcattggggtggtccgttgctaatgtaattacaaggtgaacgggatcgttagctttactaccaaagataatcccttcagtgaaatatgttagtgcgaaacctacaccattctgtacataatcagtaccagcgtgaataagtgcaatatgtggactaatgaccatatatgacccgaattgttcaaattgttttaaaattgcagctgtataatttgaatagacaatgccatcattgattaaaggttgcacagccactgcaattgcggattcaattgataatggttgtttatttataatgatgcgatgttcaggcaataaatctgcgagtgacttgccatcagttgccattttcatgactcgttgttctcttgagtcattgataatttgattcaatttttgacgagattgttgattgataaatggatcgacatgaataactggtacagctgatatttcacaaggtactgttgaaatgacataatcaatgttatcttgcaataatcgactttcttccaattgataaatggaataggcatcccaaatgtgaaactcaggatacaggtgatttagttttgattttaaaagttgtgacgtgcctataccagaaccacatagtaagacaaccttaatcattgattgtttatgtgttgcaacacgctctatacttgatgcgaagtgaattgtaatgtatgttaattcatcttcgttgaagcgaatagcagcatcttgttcaattggactaatatgcttgctaacggcttcaatgatttgaggatagcgacgcataacttcttgcctcaaaggattaggttgtagcatatcgtatttaatacgatgtatagctggtttgatatgtgtgatcagactggtatgtaacttgttgtcttttgacatatcaatgcctaattcttggctaacacaagtgatcaattcatgtatattttgcgataaatcatggtattcaaaggtaattgaagatgctgtatgttcagtcattttagagcctagtaaatgtaacgtgataaagataatttcagactctggaaatgtgacattacaactgcgttctaagttttctatcatttttgaagcaatagcatactgattagtatgtcgccatttatcaatttcattgataggtatatcgaacgaaaaattttcatttaaacgctgaatggcaatgagtatatgatagattaagccatcgatagccgactgaactaaatgataattttcactatttaatgtcttaataatggcacggcgaaccaatgcgattgattctgaattaaagatatccgcctctataaaaggtgcagcttgtttcatatattgatgtataaagtgtgcatacgctttacgataatgatcttcctcaccaataatattgaatcctttattgtggacataatttaactttaaatggtattgatctagttgggcttgaatcattttaatatcatctgcaattgtccgacgcgaaacattaacatcttgcgcaagttgctttgttgaaacaggatcggttgtttcgaataactttaaagcgatatgtgtgagtcgttcatcttttgaaaaatgaatttgatttgttagattgtgctctaattcatttaatagtgtcgcgtgagctgttgttactttgatgcctgcagctttattacggctgacttggtaatgataagtttcagcatattgctcaatatatgctatatcatattgaatggtacgaggtgatacaccaagttgattagcaatggtattgattggaataaacgtttgctcatgaattaaaagatacaaaatttcgatttgtctataacttaacaacgtaatatcctcctatttgtaattgtaagcgatttcttaaaaacgtagatatgcaatctctttcatattttaatccgaaaaattgcatatcaaaatgtttatggcgcaagattttataggaacttttaaaataaattagatattcatgttgacaatttaaaaatgtcgcagtatatttagttagacatctaacgaaatggtggtgcaataaatggaattcacttattcgtatttatttagaatgattagtcatgagatgaaacaaaaggctgatcaaaagttagagcaatttgatattacaaatgagcaaggtcatacgttaggttatctttatgcacatcaacaagatggactgacacaaaatgatattgctaaagcattacaacgaacaggtccaactgtcagtaatttattaaggaaccttgaacgtaaaaagctgatctatcgctatgtcgatgcacaagatacgagaagaaagaatatagggctgactacctctgggattaaactcgtagaagcattcacttcgatatttgatgaaatggaacaaacactcgtatcgcagttatctgaagaagaaaatgaacaaatgaaagcaaacttaactaaaatgttatctagtttacaataaatgataagtgtgactggtagaaatcagtcactttgtctttaatattatagttagatatctaattgttagtaagctaattattggaaaagacaaggagtattgaacaatgaaagacgaacaattatattattttgagaaatcgccagtatttaaagcgatgatgcatttctcattgccaatgatgatagggactttattaagcgttatttatggcatattaaatatttactttataggatttttagaagatagccacatgatttctgctatctctctaacactgccagtatttgctatcttaatggggttaggtaatttatttggcgttggtgcaggaacttatatttcacgtttattaggtgcgaaagactatagtaagagtaaatttgtaagtagtttctctatttatggtggtattgcactaggacttatcgtgattttagttactttaccattcagtgatcaaatcgcagcaattttaggggcgagaggtgaaacgttagctttaacaagtaattatttgaaagtaatgtttttaagtgcaccttttgtaattttgttcttcatattagaacaatttgcacgtgcaattggggcaccaatggtttctatgattggtatgttagctagtgtaggcttaaatattattttagatccaattttaatttttggttttgatttaaacgttgttggtgcagctttgggtactgcaatcagtaatgttgctgctgctctgttctttatcatttattttatgaaaaatagtgacgttgtgtcagttaatattaaacttgcgaaacctaataaagaaatgctttctgaaatctttaaaatcggtattcctgcatttttaatgagtatcttaatgggattcacaggattagttttaaatttatttttagcacattatggaaacttcgcgattgcaagttatggtatctcatttagacttgtgcaatttccagaacttattatcatgggattatgtgaaggtgttgtaccactaattgcatataactttatggcaaataaaggccgtatgaaagacgttatcaaagcagttatcatgtctatcggcgttatctttgttgtatgtatgagtgctgtatttacaattggacatcatatggtcggactatttactactgatcaagccattgttgagatggcgacatttattttgaaagtaacaatggcatcattattattaaatggtataggtttcttgtttactggtatgcttcaagcgactgggcaaggtcgtggtgctacaattatggccattttacaaggtgcaattatcattccagtattatttattatgaatgctttgtttggactaacaggtgtcatttggtcattattaattgctgagtcactttgtgctttagcagcaatgttaatcgtctatttattacgtgatcgtttgacagttgatacatctgaattaatagaaggttaaatatttcgtccacttctggctgagtatatttcggtcggaagtgtatttttcgaaaaaaataaatatatgatacgattatgaaaaaataaagtgagattggcatatgtgtaaatctaaaatactgttgaaaaatatttttagtgaagaatcagaagttaaagatttaactgaagaaaaatataatcaagattacgaagcattaacatttagctttaaagaggaaacatatcaaagtaggttagctaagaaaacaccgactaaatcgggatatttcgtgacatgttggacaaaagacgaagataattataatcggccatacaaaattgaagagtttgctgattacctgattgttgctgttatcgatgatgaattaaatggctactttctatttcctagggaattattggtagaaaaaggtatcttagcttcatctaagtatcaagggaaaatggcttttagagtttatcctaagtggtgtaatcaattgaataaaacagcagggcaaacacaaaagtggcaatgtaaatatttttttgaatactaataaaaagtcatatggttgaacttataagagatgaatatatcatctttcgataagataaccatatgactttattttttatcatttaatgatgaacggtttcttgtcctactttattccaagtgaggataaagctcaacattgcaaacacactaattgctgttaataaaataaaaccgacatcccatccgaatttatcaactacagcacctaagacgatgttggccattacagcaccaaacagataaccaaataatcctgttaatccagctgctgtgccagctgcttttttaggtacataatctaatgcttgtaaaccaattaacataactggtccatatattaagaaaccaatggcaattaatgagacattgtctaaccaagcattgcctggaggatttaaccaataaattaatacaaatactgtgacacctaacataaagaagaaacctgcaggtccacgacgacctttgaataatttatcagaaatgtaaccacataataatgtaccaggaattccagcccattcgtataagaagtatgcccaacctgatgcttttaagtcgaaatgtttttcttcacttaagtagactggcgcccaatcaagtacaccataacgcacgaaataaacaaatatatttgcaaaggcaattgcccatacccatttattgttcagtacatatttaaataaaatttcttttgtagttaattctgtttctaatgttttcttatcgcttgtagcaaagtcatttttataaatttcgattggaggtaaaccttgagattgaggtgtgtctctaatcaatacgtatgaaattgcggcaatgataagtgctaagagtgcagggtaaatgaatacaccttcgaaaccttttaaataaccaaagttgataaatgcagttgttgtaataccccaagcagcaataggtgccataatacctccaccaacattatgcgcaacgttccaaagggcagtcttacttccgcgttcacttacactaaaccagtgaacgagaacacggcctgaaggtggccagcccataccttgaaaccatccatttaagaataataggacaaacataataccgatacctgatgtaaagaacggtacaaatcccattaacaaattgacgatagcagtgagtgctaatccaagaactaagaatatccgagcattgctccgatcacttacagtacccataaagaacttactaaatccatatgcgatggaaacagcagaaagtgcaaaacctagttccgcttttgtaaaaccttgctcttgcaatgccggcatcgctaacgaaaagtttttacgtaataaatagtacccagcgtaaccgatgaaaataccaagaaatacttggagacgtaatcgtttataggtatcatctatctgattttctggcaaaggcttaatatgctttgcaggtttaagaaaattcataaaatcctccttaatatgtatttatatgcattttgtgcgataaacttatattagacatgtatgaaagcgttgtcaatatgcttttgtgaaatcttgcatatttagttattgaagtattttataaacatttagaaaaaataaattgctacacataaatttataattatgcaattattatgtcgttatacatactagctgtgtatctacgaatgagtacaaacatatttttatttgcaaggggtaaatggcatataactatcttttttatgtaagctggtataaaatttatactaataggagggatagtatgaatatagtagggcatcatcacatatccatgtatacaaaagatgcaaaacgtaataaggatttttacacaaatgtccttggattacgattagttgaaaagtcggttaatcaagacaatccttcaatgtatcatttgttttatggggacgaagtaggtacagccggaacaattttaagcttttttgaaattcccaatgcgggtcataagcagccaggtactgaaacgatttatcgattttcattattagtaccaaatcaagcggcacttcattattttgaaaaacgtcttgagaataatggtattaagtctgaacgtttgtactatcttggacaagaaggtgttgtctttaaagatgaagacgacttagaaatcatattgcttgttaatgatagttttgaagtaccacatcaatggcaacataacgcttatagtgaaatacctcaagcatatcaaattttaggaatagggccagtcgaattaagagttagaaatgcagcgcgtacggtagaatttttggaaaatgtcttaggttatcgcaaaagagataataaatcattcgatgtgctgacattagcaccacaaggtttatattcggattttgtagttattgagcaacagggacaacgtgaaagacctggacgaggttatatccatcatattgcagttaatacaccacaaatgagtgacttagatgcaatttacaagaaattacaacaacaaccacaaagtaattcaggtataattgatcgctatttctttaaatcattatactatcgccataattcaattatgtatgaatttgcgactgaagcgcctggatttactattgatacacctgttgaacaattaggaagtcaattgaacttgcctgactttttagaagcagaacgtgaacaaattgaaagtaagttacacgaaatataaaggagaatgtttaatggccaaattagaaatgaataaaaatacgcctcttgagtttggtttgtattccttaggtgatcatttattgaatccattgaaaggtgaaaaagttagttatgagcaacgtattaatgaaattattgaagcaagtaaattagcagatgaagcaggtattgatgtttttgcagttggtgaaagtcatcaggagcattttacaacacaggcacatacggttgtgttaggtgcaattgcccaagcgacaaagcatattaaagtttcaagttcttcaacgattattagtgcaacagatcctgtaagagtatttgaagacttcgcgacattagatttgatttctcatggtagagccgaaattgtagctggcagagcatcaagaacaggtatttttgacttgtttggctatgatttaaaagactatgatgaattgtttgaagaaaaattaggtttacttttagagttaaataaaactgagcgtattacttggtctggaaaatatcgtccagaacttagaaatatgaaaatattcccaagaccaatcgataatatattgccaatatggcgtgctgttggtggtccacctgcaagtgctattaaagcgggaaaacaaggtgtgccaatgatgattacaacccttggtggcccagcaatgaactttaaaggttctatagatgcttatcgtcaagcggcaactgaagcaggtttcgatgcttcgcctaagtctttaccagtaagtacagcgagtctgttttatacagctgaaacaactcaggatgctatgagagaattttatccacatttgaatacagggatgtcatttattcgtggtgttggttatccgaaacagcaatttgctaattcgtcagattatcgagaagcgctaatggttggaagcccgcaacaaattattgaaaagatattgtatcaacacgagttgtatggtcatcaacgttttatggcacagcttgattttggcggtgtgccatttgaaaatgttatgaagaatattgagttaattggcaacgacattataccggcgattaaaaagcatttatcaaaataggaggggcgtcatcatgaatattgtattattgtcaggttccacagtaggttctaaaacgagaattgctatggatgatttaaaaaatgaactagaagtcatcaatgagggacatcaaatagagttgatggatttacgagaacttgaattagaatttagcgttggaaagaattatctagatactacaggagatgtatataaattaacgacgtcgttaatgcaggctgatgtgatttttattggttttccaatttttcaagcttccatccctggtgctttgaaaaatgtgtttgatctacttccagtcaatgcgtttcgtgacaaggtaataggacttgtagcgacagcaggttctagtaaacattatttaattcctgaaatgcatttaaaaccaatattgagttacatgaaagcacatacgatgcaaacgtatgtatttattgaagagaaagatttttcaaatcaacaaattgtcaatgatgatgttgtatttcggttaaaagcgttggcacaatccacaatgcgaactgccaaagtacaacaacaagtgtttgaagaagaaaacaaccaatacgacttttaaagtataaaaataagacgctcggcacactaaatttgtaagtgtttgagcgtcttttcatattaactatatagccaatgaacgacgataaaggcaagtgatgacaagcatattgaggtaataatgattgtcataagcggtttaagtgcgcgatttttaagatctttaaatgcaacatttaaccctaaagcaaccatggccattaataagcaaattgttgatacagtatttaaaatatttagcaatgctgacggaatagttacatatgtattcactaaggccataatgacaaatccaattaaaaagtatggaatgcttattcgacccttgctagatgattctgatgaacggaaacgcataattaaaataagtacgatggttaatggaatcagtaagaatactctaccaagtttaccaagaagtgcaattttaagtgcatcactaccaccaaagccaccagctaagacaacgtgtgcaatttcatgaagactaacaccagaccaagcgccataaacatttgtcgtcattgaaaagatagcgtagatagctgtatatataagtgaaaatatcgtaccaatcaatgcgatgataccgatactaatagctgtatccttttcacgtgatttgaatattggagcgactgcggcaatagcagcagcaccacaaacgcctgtgccgacacctagtaataatgcgatgtttttgtcaccatgcaacagtttgttgacaaagagcatcattacaatactgaaaataacgacacctacatcgatggctaatagtttactaccttgaccgataatatcgaatatattgagtttaagtccatataggatgattgcaaatcttaataaatatttagatgaaaacgtaatacctgagctatattgttcaggatatcctctaaagtgacgatatagaatagcgattaatatcgcgatagttaatgcgccaaccttatctaggattggcaatttagctgctaaaaagctaaataatgcgactataaatgttagtgatagcccaatcataaaatgcttatttttcaatgatgccatgagcagtgcctcctttaatagcattttagcactgttttgtcgtatttttaaatataaatttggaatgaataataaagtagtgattaaattaagttgtgtgataggaaacttggacatcaatcaaagtaataggcactacaacgcttattggcggggccccaacaaagaagctgacgaaaagtcagcttgcaataatgtgcaagttggggatgggccccaacatagagaaattgggtccgtaatttctacagacaatgcaagttggcggggccccaacatagagaatttcgaaaagaaattctacaagcaatgcaagttggggaaggacaacaaatttaagatacaatgcgtaacattaatatgttattataatgataatttacagaattatatgaaaaatgaatgaggatgtgatggtatgtttggaatgaaagtgaatgaacaaataacattaaaaattttagaagctcatgacacagaagcgcttttcaatttagtcaatcgttcaagaaattcacttagggaatggttaccttgggtagatgcaactgagcaaccatcagatacgcgtgcatttattaaaagaggacttttgcaatttgctgatggtaatggatttcagtgtggcatttggtatgaaggaacgctagttggtgtcatcggtttacatgaaattaatcacatgcacagaaaaacttcattagggtactatttagataaagaatttgagggtcatgggattatgacacaagcagttgaggcattgataaagtattgtttcgaagagcttgacttaaaccgaattgagattagtgccgcagttaataatgaaaaaagccgggctattcctgaaaggctgggatttactagagaaggtatgttacgtgacaatgaattactaaatggtatttattcatcgagttacatctatagtttattaaaatcagaatacgaccaaaaatgacaaattagacttacaaaagagtgatgacatttaaaatggcagcgctcttttatttaatttttgaaaataaaaggttgttgacagtattattttataacaatataatgattttgataattattatcaactagatgatgtttatgggaggatgctttaaaacagccgttttaagtgtaatgtattattttagcgtgtagggaatgcgaaaataatatttataagaacacatctatggggataatagaatttctataatgaggtgtcaaaatgaaaaagttaacaacgctattattagcatcaacgttattaattgctgcatgtgggaacgacgatagtaagaaggatgattcaaagacatcgaaaaaagatgatggtgttaaagcagaattaaaacaagcaacaaaagcatatgataaatatactgatgaacagttaaatgaatttttaaaaggtacagaaaaatttgttaaagcgattgaaaataatgatatggcccaagcaaaagcgttatatccaaaagttcgtatgtattatgaacgctctgaaccagttgcagaagcatttggagatttagatcctaaaattgatgcacgtcttgcagatatgaaagaagagaaaaaggaaaaagaatggtcaggatatcataagattgaaaaagcattatacgaagataagaaaattgatgatgtgactaaaaaagatgcacaacaattattgaaagatgcaaaagaattgcatgccaaagctgatacattagatatcacaccaaaattaatgttacaaggttctgttgacctattaaatgaagttgcaacttctaaaatcacaggtgaagaagaaatttattcacatacagatttatatgattttaaagcgaacgttgaaggcgcacaaaaaatttatgacttatttaaacctattttagagaaaaaagataaaaaattaagtgatgatatccaaatgaacttcgataaagtgaatcaattattggataaatataaagataacaacggcggttatgagtcatttgaaaaagtatcgaagaaagaccgtaaagcatttgcggatgctgttaatgcattaggagagccactaagtaaaatggctgtgattactgaatgacaaattatgaacaagttaacgatagtacgcaattttcaagacgtacatttttgaaaatgttaggtattggcggtgccggtgttgcaattggcgcaagtggtgttggtagcatgtggtctttcaaatcaatgttcaatacaccagaagatccggaaaaagatgcgtatgaattttatggtaaagtgcaaccaggcattaccacacccacgcaaaaaacatgcaatttcgttgcgttagatttgaagtcaaaagatagagatgcaattaaggcaatgtttaaaaagtggacggttatggctgatcgtatgatggatggtgatacagttggcaagccgagtaacaatcctttaatgccaccagtagataccggtgaatcgataggattaggtgcaagcaagttaacgattacctttgggattagtaagtctttgatgaagaaaattgggttatctagtaaaattcccgatgcctttaaagatttaccgcattttccgaatgatcagttaatagacgattacagcgatggtgatattatgattcaagcatgctcaaatgattcgcaagtatcctttcatgcggttcataatttagttcgtccatttcgagatattgttaaggtacgttgggcgcaatctggttttatctctgctaaaggtaaggaaacacctagaaatttaatggcatttaaagatggaacaattaatcctaggaagaataatcaacttaaagattatgtgtttattgatgacggatgggcgaaacatggaacttattgcgttgtcagacgtattcaaatacacattgaaacgtgggatcgtactgcgctggaagaacaagaggctacatttggtcggaaacgacatagtggtgcaccgttaacaggtgggaaagagtttgatgaaattgacttaaaagcgaaagatagtcatggcgagtatattattgataaagatgcccatacgaggctagcgaaagaagcaaatacgtcaattttacgtagagcctttaattatgtggatggtacggatgaccgcacaggtaacttcgaaacaggcttactttttattgcttttcaaaaagcgacaaaacaatttatcgatatacaaaataatttaggtagtaatgataaattaaatgaatatattacacatagaggttctgcttcatttttagtattaccaggtgttagtaagggaggataccttggtgaaacattatttgactaaatttgtagcaatgctaataactgctgctatggtgtgtagctttgggttactgaaaagtcaggcagcagaacaacaaagtattagtgatgtatatagtgtgataacggatgcgaaatctgcactttctaataattcgatatcgaatgacaataagcagaaagcaattgagcaagtggtaagtgcagttaagaaattatcgcttgaagataatagtgaaagtaatgctgtcaaatcagatgtgagaaagcttgaagatgcaaaagcgaatgataatcaaaaagatacactttcgcaattaacgaagtcattaattgcttatgaagagaaattggctagtaaagatgcgggttctaaaattaaactattgcaacagcaagtcgatgctaaagatgctgcgatgacaaaagcgattaaagataaaaataaagcggaattagaatctttgaacaatagtttgaatcagatttggacaagtaatgaaacagtgattcgcaattatgacgcaaatcaatatggacaaattgaagtcgcattattacaacttagaattgcaattcataagtcaccattagatacggcaaaagtgtcacatgcttggacaacttttaaatcaaatattgatcatgtcgataaaaaaagtaatacgtctgcaaatgatcaataccatgtatcacaattaaatgatgcgttagagaaggcgattaaagctatcgacgacaatcaattgtcggatgctgatgctgcgcttacacattttatagaaacttggccgtatgttgaaggtcaaattcaaactaaagacggtgctttgtatacgaaaattgaagataaaataccatattatcaaagtgtattagacgaacataataaagcacatgtgaaagatggtttagtagatttaaataaccaaattaaagaggttgttggccatagttatagcttcgtcgatgtgatgattatctttttacgtgaagggctagaagtgttgttaattgtaatgacattgactaccatgacgcgtaatgtaaaagataagaaagggactgcaagtgtgattggtggtgcaattgccggacttgtactgagtattatcttagcaattacgtttgtagaaactttagggaatagtggcattcttcgtgaaagtatggaagcgggattaggtatcgttgcggtcatattaatgtttatcgttggtgtttggatgcacaaacgttcaaatgcaaaacgttggaatgacatgattaaaaatatgtatgctaatgcgattagtaatggtaatttggtattgttagcgacgattggtttaatatctgtgttgcgtgaaggtgtcgaggttatcattttctatatggggatgataggtgagctagcgaccaaagattttattattggtattgctttagctatcgttattttaatcatctttgcattattatttagatttatagttaaattaatacctattttctatatatttagagtgttgtcgatctttatttttattatgggattcaaaatgcttggcgtaagtattcaaaagttacaattattaggtgcgatgccaagacatgttattgaaggattcccaacgattaactggttgggcttttatccaagttatgaaccattgatagcacaaggtgcttatattatggtagttgctatcttaatctttaaatttaaaaaataaaaaacaggccgagtgcctgttttttttgttgctatattggaaatattcggtattgcagtataacgataatcacagcattgattcgtataaggttaatgtgttggcggtttgcctcggcatgtgaacttaacgatgaacatactgaactcaaagagcaatatgagtggcaatgtgagtaatatatttaatgttaaatcgggtggtgcaatgatacttgctaatacaaagcaagcgaaataaatatatttacgataatgtttcaatgatgtggtatctataagaccgaattttgcaagacccataaataatattggtaattgaaatagaagaccaaatgtgaataaccaacgtatgagttcaatcaaatatgctttaaagccaatgacaggcgaaatgtttaaagttaatgataattttaacgcgaattgaatgatcattggaaagccaacataaaatgcaaaagcgacgccagcacagaataataacacgctgaaaaaactatatttataaataaattgacgttcattattatgtaatccaggtgcaatgaatgcccacaattgataaaacatgactggtgaaatgaaacaaaacgcgatgaaaaatataatcatcacgtatatttgtatcatttctgtgaatgaaaatgcatgtaaggacacatgtgcacgggtaatatacgttatgaatggtgtcatccaccaaaatgatgaaacatatacgacgatgaccgtaatgacgaacgacaataaaatttttactaaccgatggcgtagttcgctaaagtgaaccagtaaggtgtggtcagtgctattgctctcgctgttgtttcgattccttactgggtgtatcgtgagactctttatctaaatcttctgttgcagatttaaattcttttaaagtagaaccgatggcacggccaaattgtggtaattttttcggaccaaaaataattaaagcgataatgctaatgacgacaagacttgttgggcctgtgatgcctaaaataaaagtgttagttatcatgataatcaacctcactcataagtagtatatagtatttactttataccgaacgataatgattatcaataaaattttatgaaataattaaaatgttgctataaatatagtttattgagggattaattctgaaataacagcttggtcttgcaagtcgatataagtacaagtgcccgcttgaatatcgatatgccatttataaatgccagcttcagccatttcatcacaaaatgtttcaaaatctgtttgcccttgttgatgtctagttaagacgtcttgaactattgttttgtttgatttttgagcaacaggatgattactttttacagatgacgtaacgatatcatcttctgattgatgtacgtatgttgcagtgccatcttgaatgttgacgatattgtaagtcatccccatatctttaaaagctttgaatagttttggaaagtcaacaccagtaaattgttgatgtgcttgttgaattgcagataatgtaaatgccataatagtctcctttgaatggtttgatttagtgaaaatgcgtgcatcatactaaaattagaatgctgttaattatgcaggaaggtgtaacgaaagtaaacaattatgacttgtaggcgttgaggtgtttgtttcaaaatgtcatacataggtggataatcatattttttggtgtagatttgacaaatatagttgtcaaaaagacgcatatcatttacagtgtaattaaggagttgatgcgatgtgcgtaatcgattgaaagaattacgagcacgagatggcttaaaccaaacgcaacttgctaaacaagcgggcgtttcaagacaaaccatatcgctaattgagcgaaacaattttatgccatcagtattaacggcaataaaaattgctcgcattttcaatgaaacggtggaaactgtttttattattgaggaggatgaggcatgaaaatactaagatatatcggatatcttttactgggtggacttgtagggggtatcataggtggaattttaggtaattttgatggatttggtattgagaacttgacgtttgcgacatataacaatgtcgttgtaatatcgattgttgcgacgattattatcatattggtagaagccattgttttgatgaatcaaagacgtgcattgaagtataagcaacttgtagataaagaggtagatatcgatgcaacagatcaatatgagttgcttgcgaatcgttatgttttaaatggaagtatattaagtattctgcagacagttattgcttttttagtattgcttatttttgtggtagggcacgctgcagcaaatgcaatactattctttttaataccattttttgctagtgctattttcaatacacaatttacactgtttaatagaaggtttgatgacagaataccaaaaattgcagataagaattacactgaaaagcgattggaaatattggatgaaggtgaacgccatatagaattaattgcattatttaaaacatatgcgatcaacttatcaatattgatactagccattgtagtaattgggctttattcaattactactggaattaatcaaagctttagtttgctacttatcattgctattttcatatataacgcctttagttatttattgaagagaagacgtttttattaaaattaaacaaagaggagcatggatatgacaacattgttaaacgtagatagtgtgaacaaacaatacaaagattcggattttaaattgcaagatgcatctttaacgatttctactaatgagacagttggattaattgggaaaaatggctcaggtaaatcgacattaattaatattctagtaggcaatcgacataaagataacggtagtatcacattttttggagaagaacataccgtggatgatgtcgaatataaagaacacataggtgtagtgtttgatgatttgagagtgcctaataaattgactattaaagatattgataaagtatttcaatctatttatatgacttggaatagtcaaaaattctttgatttaatcaaatatttcgagttaccactacaaactaaaattaaaactttttcaagagggatgcgaatgaagatagctttaacgattgcgctttctcatgatgtgaagttattaatcttagatgaagcaactgcaggtatggatgtttctggaagagaagaagtaatggaaatactagaagattttgtcgcacaaggtggaggcatcttaatatcatcgcatatttctgaagatatagaacatttagctgataaattagtgtttatgaaagatggacgaatgattttaactgaacagaaagatatacttttagcacaatatggaattgttacgacagaagataaagatgttgaaattcctaagcatttaatcattgcttctagattgtcaaaggggaaatatcaaattttagttaaagattatgcagaaattgaaaatgcagagcctttaaaacacattgatgacgctacaaaaatcataatgcgaggtgaagtataatgaaaggtatgttcctaagtagtttttatgcaacgagaaagcaaacatatatttattttatagtcgctattatagctgcaggatactttgcagtatttaatccgttgatgagttcggcaatggctggggttatgttaatcacacctattactgataatattaaacatgaaaaagactcaagatggatgtattatgtatctactttaccggttaaacgtagtgattatattaagtcatactttgccttttatttaatcttattcggtgcaagtttaatgattggattagttgtgactacgattgtgacccaaagtgtgatgattggtattatgtcaggtttaatgagttttggtatcataggggcatactctatcattttcccattgacatttaaatttggcgctgaaaactccaatgtcattatgatatgtgcatctatactactacttatttctttcgtggtctttttctttatatatggtatggttagtggtgcatctgcattagaatttgaaaaaattagcactgaaggatggctagttgtcatagcatatgcggtcattggtatagttataacgagcgtttcttatatgttgtctattaaaatttttaacaaacaagaactataattgtcgattttggtgatgatagtatttgaaataatatttagagcaggtgataaatctttacgattgtcatctgttctttttggtgtggaatgaaatgtgggggataagtataggtgacatatctatattgatttatttgttttgaggtggttatgttgtgtgggaattatttccttttagatagcggggattagaggatatatgttatttataagtatcatttgatgattgtataggctaacgatttcctcggaaatatttaaaaacctcgatcatgtagcataactgaagtttgtcacaaaagtataatgtgaagttcgacacttttggattcagttcaaatactttgaccgaggtaaatactatttattcatgtttattacgtagacgttgatttttaaaataaatcagcatgatgcagaaggttgcaactgatactgagataatcattacatggtcgtgacctttaaataaaaggctgacaatataagacataacgagtatacctagtgaatatgaaatatacttcgcgtttgtcagttcattatggaaataaggcgtgattaaccataatccaatatagaatattaaaacactgatatacatcatattaatttcaaacaagtcatttagtttattgttattactaaaaacaattgcagcattaatcacacctaaagcgatattgattaatagatgcgtatacgataaacggaaaccgatagatgttaatttatgattaatataattttcagtaatgatccaatatacaccgaaaagactaattaaaatcataaattggaatatataaatgtaactaaaatgatcaatgctaaatgatgacgaagctaaaccaaccagtacctcgccaaagataataattgttagtaacgaaaaacgttctactaaatgcatcatattaacaggtgataatacaagatatttctgaaatggaataagtcctgtcgctgcaatgaatacgcctaaaaatccagggatgtaatggatactttgtggtagtactaatgatagaaatgataaaaatgaaatcacaaaggctacgctcgcaaaagcttgacatgtacgcttatcgccataatctaaccctgtacgtatatgtaataaatactgtaatccgatacttaaatacataattgccacgcataagaagaatgggaagaatgtcttttcaaagtccggatataggctgttagataggaagaccatgatgaacatattaaacatcataaacgagacgtctttgaatgtaacttgaccaaatcgatttgtaaaaaatgtttgatgagaccacattaaccataagaacaaactcatgacgatgtatttgaaaaataaatcagctgaaatggaaccgttttgtgttgttaaaatcacatgtgcaattttttgaatggcatagacgaaaattaaatcaaagaacaactcatggaatcctgcacgcttttcagctaaatgttttggtgttaatgcattaaccataaaattttaactcctttaagatgtgtaattaatttactaagtatactatttattttttctagtgaataggggcagatttggcgatgaagtggaaggagaggtgactgcaaggtaattgcggaattaacaatcatcagcgatttaatatttgactggagacgtcatggtaataaaaaattgatgagaaattgatggtgaaaccagctgtgaatagcgatgcaatgatagatagaatttaattagagtcattacgcgaaatgattaatgataatttgtggtaaatcaaagcataattttgtactatagatgaggatgatagagcatatttaagagggtgaaatgttaaagtgaaaccgtttacgtttccgattgcccaaacaaattacatcattgtataatatgatttgttaaatgcataacaagaatgaaaatgtaacatacgtagcaattggtttcataaattggatgttagtggcgtattggttcattagacgtattagtaataaaattgtatatatcataaggagatgaatatgacatgacgagagtcgtattagcagcagcatacaggacacctattggcgtttttggaggtgcgtttaaagacgtgccagcctatgatttaggtgcgactttaatagaacatattattaaagagacgggtttgaatccaagtgagattgatgaagttatcatcggtaacgtactacaagcaggacaaggacaaaatccagcacgaattgctgctatgaaaggtggcttgccagaaacagtacctgcatttacggtgaataaagtatgtggttctgggttaaagtcgattcaattagcatatcaatctattgtgactggtgaaaatgacatcgtgctagctggcggtatggagaatatgtctcaatcaccaatgcttgtcaacaacagtcgctttggttttaaaatgggacatcaatcaatggttgatagcatggtatatgatggtttaacagatgtatttaatcaatatcatatgggtattactgctgaaaatttagtagagcaatatggtatttcaagagaagaacaagatacatttgctgtaaactcacaacaaaaagcagtacgtgcacagcaaaatggtgaatttgatagtgaaatagttccagtatcgattcctcaacgtaaaggtgaaccaatcgtagtcactaaggatgaaggtgtacgtgaaaatgtatcagtcgaaaaattaagtcgattaagaccagctttcaaaaaagacggtacagttacagcaggtaatgcatcaggaatcaatgatggtgctgcgatgatgttagtcatgtcagaagacaaagctaaagaattaaatatcgaaccattggcagtgcttgatggctttggaagtcatggtgtagatccttctattatgggtattgcaccagttggcgctgtagaaaaggctttgaaacgtagtaaaaaagaattaagcgatattgatgtatttgaattaaatgaagcatttgcagcacaatcattagctgttgatcgtgaattaaaattacctcctgaaaaggtgaatgttaaaggtggcgctattgcattaggacatcctattggtgcatctggtgctagagtattagtgacattattgcatcaactgaatgatgaagttgaaactggtttaacatcattgtgtattggtggcggtcaagctatcgctgcagttgtatcaaagtataaataataagaaaacaggttatcacaacagtattaattacatgttggcataacctgtttttatttgtttatggatttattgggtaatattagtcatttgatggtttaattgcaaatgctctaacagggaacccaggtgcatcttttggtttagggctgatagcgtaaatgatggcgccacgagttggtaattgatctaaattagttaataactcgacttggtatttatcctgaccaagaatataacgttcgccaactaaatcaccattttttacaacgtccacagatgcatcggtatcgaatgtttcatgaccaacagcttcaacacgacgttcttcaattaagtacttcaaagcatctaatccccaacccggtgcatgttgttgtccgttcgcatctttgttttcaaacttttcaatattaggccaacgttttgaccaatcggtacgaagtgcaacaaaagtgccaggttcaatagtaccatgctctttttcccatgcttctatatgcgcacgtgttacgatgaaatcattgttgttcgctacttctgttgaaaagtctaatacaattaacggcaataccaattcttttaaatcaatgtcttctaaataacgtttattctcgacaaagtgaattggtgcatcaatgtgagtaccatattgcgttacaatattccaacgttgcacatagaaaccatgatctttaaccgtgaataaagttgaaacttcgcctttttcaaactcactaaaacgtggtatttccggatcaaatgtatgcgttaaatcaacccaagttgcttgttttaaagtatttaattgttgccataaaggatattgtgtcataaaatcacccgtttttagtttattatatgataaatgctgcgattattcttggcgtttagctttaacagcattcacaagcacagtcaatgcatctttaacttcttcttcttttcgcgtttttaaaccacagtcagggtttacccagaataatgagcggtcgatttgttgtagtgaacgattgattgctgtagtaatttcttcttttgttggaatacgtggactatgaatatcatatacacctagaccaatacctaaatcataattaatatcttcaaagtctttaattaaatcaccatggctacgagatgtttcaattgaaataacatcagcatctaagtcatgaatagcatgaatgatttgaccgaattgagaataacacatatgtgtatggatttgagtttcatcacgaactgaagacgttgcaagtttaaatgataaaacagcatctttaagatattgttcgtgatattcagagcgtaatggtaagccttcacgtaatgcaggttcgtcaacttggataactttgattcctgcagcttcaagtgctaatacttcttcgttgattgctaaagcaatttgatcttgaacgactttacgtggtaaatcaacacgttcaaatgaccagtttagaattgttacaggtccagttaacatacctttaactggtttatctgttaagctttgtgcataaactgtttcatcaacagttaaaggcgctgtccattttacatcaccataaatgattggtggttttacggcacgtgaaccatatgattgcacccaaccgaatttagttactaagaaaccttgtaatttttctccgaagaattcaaccatgtcattacgttcaaattcaccgtgaactaatacatctaagccaatgtcttcttgaattttaatccatcgagcaatttcattttttaagaatgtttcatatgcttcgtctgtaatgcgtttgttcttccaatctgcacggtattttcgaacttctcggctttgtgggaatgatccaatagttgttgttggtaaatccggtaagttcaaacgtttttgttgttgttcaatacgttgcgcgaatggtgattgtcttgaagtacgcacgctttcgaaatcataatctaagtttttgaatgattgattttggaaacgctcataacgtgcttttaatttatcatatttaacactatcgttttgattaaataggcgacgcaatgcatctaattcgtctaatttttcagttgcaaagcttaagccttcgccaacacttgtatctaatgtttcatcatctaaagatactggaacatgtaataatgaagatgatggttgaatgacaagttcattagtgtgtgctaacaatttatcgattaagacttttttagcttcaatgtcacttgcccatacattacgaccatcaataattccagcgtataatgtttttgatttatcaaaatctccagcttcaatttgtttaaggttatagccattatcatggacaaagtctaaacctataccaccaacaggtaaagaacttaagaatttaagatgtgcacgttcaaagtatgtttgaatgactaattttttagcaacaccagctttttcgaaatagtcataagcttcacgtgtaatattttcatagctttcgctgtcgtctgtaactaagattggctcatcaacttgaatgtactcagcacctgcatcaattaatgattcaaacacttctttataaagtggtaataacgttttaactttttcttcaaaagtttggtgaccgccttttgataatttaacaaaagtaatcggaccaacaatgacagggtgagcgttaacgtttaaagattgggcatatttaaagcgatctaataatacattgcgactcactttaggctcaacattgtcccattcaggtacgatgtaatgatagttagtgttaaaccattttataagtgcacttgcaacatggtctttattaccgcgagcaatatcaaataataaatcatcatcaatagttcttccttggaaacgttcagggatgatgttgaataataatgacgtatctaatatatggtcatataaagagaaatcaccaactgggatgctatctaagtgatagtacttttgtaataataaattttctttatgtagatcagttaatgtttgatctaattcttctttagaaatcttctttgcccaataactttcgatggcttttttccattctctttttctacctaatcttgggaatcctaagtttgatgttttaattgttgtcataatattgcctccttgtgagcagtaatagattttgagtatgctgcaagttctaatgaatcttcgacattttgaaacggtgtgataatgtataaaccattaaaatattcatgaacagtatcgattaaatcctttgaaagcttaagacttagttctcgtgttttggctttatcatctttaactgcttcaaattgttgtaaaatttcatctgacatcttgattcctggcacttcattatgcaaaaagagtgcgtttttgtaacttgcgataggcataatgcctatgaaaaatggtttgttcaagtgcttagtggcatggtaaatttcaatgattttctctttgctgtacacgggttgtgttataaaataagacattccgctttctatctttttctctaatcttttgacggcaccatataatttacgaacattagggttaaaggcgccagcgatgttgaagtgtgtacgtttcttcagcgcatcaccgtcagtgttaataccttgattaaatcttagagcgagttcagttaatcctttagaattaacatcatagacattggttgcacctggtaagtgaccaacttttgaaggatcaccagttatggctaatatttcgttaacgccaatgagcgataatccaagtaaatgggactgcaagccgattaagtttcggtctcgacatgtaatatgtacgagtggttcaatattgtaatattgcttaattaagctagcagcagcaatattgctaattctgacagttgccaatgaattatctgcgagtgttaccgcatctacattagctttatcaagtttagcgatattttcaaaaaatctatccgtgtctaaatgtttcggtgtatccaattcgataataacggttggacgttcttgaaccttagatgttaatgattgtctaactttattttgagatggattgaaaagtgctttcgttggtatcggaatcacttttttgtcattaacaggtttaagtgtctgaatagattctttaataaatttgatgtgctctggcgttgtaccacagcaaccaccaattaaacgaacaccttcgcgaattagattttgagcaacttgaccgaaatattgtgcattgtcactatacttaaattcactattttcaatatctaataagctggcatttggataacaagataagaatgcgtgctctggtaattcaatatgtgtgaaagactcttgcatatggtgcgggccatgatgacaattgagtcccacgatgtttgcaccacattgaacgagttgttttaatccttcattgattgcctgaccattaactaagtaatttgtgtttgaagcggttaattgagcaatgattggaatgtcgtatttctttctcgttcgtgaaatgacatttgttaactcttctaggtcgtaatacgtttcgaaaagtagcgcgtcaacgccttcttcaattaaggtgtctatttgaatttcagtatgataaagaatagtttgtaagctgatatcctcttgtttgatacctctaaacccaccaactgtgcctaatatatacgtatctttatttgctgctttttttgcgatgcgaacggcggcttgatgtattgctttaactttatcttcaagaccgaatcgttttaacttttcaaaatttgcaccataagtattggtttgaatgacatcagcaccggcttcaatatatgaacgatggatgcgttcaactttatctggatggctaagattatatgcttctggacaggtgtctaatccttcagagtataaaatggttcctatagcgccatcagctactaaaacattatctttcaattgtgtgaggaattgactcattgaatgcctcctttaatgcgtatttgatgtctgcaatgagttcatcaggatcttcgagaccaacacttaatcggaatagaccgaaagtgataccacgttcttgtctcacttcttcaggtagtgcagcgtgagacattgttgctggatgtgaaaggatcgtttcaacaccgcccagactcactgaaacgagtggtaatgtcagtgcatcgacaaattgttgtgctttagactcatcagctaaacgaaagccaataacggcaccgccatttttagcttgttctaaatgagcagtagtgagtcccggataataaacttctgaaatttcatcttgctttattaaaaatgacacgattttttgagcgttttcgacagattgtttaaatctgattggaaaagtttttaaatgtttagcaagtgtccagctatcctgagcagataacatattgcctgtaccattttgtattaaataaagagcgtcactaattgcctcattattagttatgacagcaccagcaattaaatcgctatgtccacttaaaaattttgtagcactatgaatgacaatatcagcgccaagtaataaaggtgattgacctaacggtgtcataaatgtattgtccacagctaccagtagttcatgcttttcggctattttagaaacagctttgatatcagtaattttaaaacagggattcgatggtgtttcgatataaattaattttgtgtttgattgaatggcaccctcgatttgttcgagctttgtagtatctacggttgtaaattcaatattaaatcgattcaaaatttgctcagtgaggcgaaaagtaccgccatatacatcatcgggtaagatgacatgatcaccagatttgaaagtcaaaagtactgctgaaatagcagcaatacctgatgcaaaagcaaaagcgaattttccctgttctaatcgtgctaacttctcttctaaaagttcacggttagggttgccacttcgtgcataatcatatttaacatcgccaccaagacttgtttgatggaatgttgaagaatcatagagtggtgggttagctgaatgatattccacacctctacgccaatcgaatatcacttctgtctcttttgaaagtgtcatacaatctctccaatctgagctttatctaatgcttggatgatatcgcgttcgatgtcttcataattttcaacacctagtgataagcggattaaatactcatcaatgccacgtttatctttttcagcatctggcatatcaacatgtgtttgggtgtaagggaaggtcactaatgtttcagtacctcctaaactttctgcaaaaatgcaaatgtctaaattttctaataatttagcgacgctataggccttgttaagtcttaaactaagcatgccagtttgcccgctatatagtacttcgtcaattgcttgaagtgactgacattttttagcaagttttctagcgtttgattgcgcacgctcaatgcgtaaatgcaaagttttaagtccacgtaacaacaaataactatctattggtgaaagtgttgcgccagtcatgttgtgaaaatcaaacaactgttgcgcgagtgattcatctttgacggttacgacacctgctagtacatcgttatgtccgccaatatatttcgtggctgaatgtaagactatatcagcaccttctgctagtggtgttgaaagataaggtgttaaaaaagtattgtcgataattgacaataagcctttagctttacaaagttgatagtatggctttacatcaatagcaatcatttgtgggttagatattggttcaatgaataatgcaactgttttatcagtgatttctttttcaacttgttcataatctgtaaaatcaacgtacttaaatttgatatcgtattgttgctcgtaaaattcaaataatctaaatgtgccaccatataaatcgaatgaaactaaaatttcatcatgaggtttaaatagattacatattaattgaatggctgacattccacttgatgtagcgaatgatgcaataccatgctcaagtttggcaaaacaggtttcaaatgttgagcgtgtaggatttttagtacgtgtataatcaaaacctgtcgattgtcctagttttggatgcttgtaggcagtagataaatggattggattcgctatagcaccggttgaatcatcggttaatgtgatttgggctaactgtgtatccttcatattaagaccctcctataagaaaaaataaaaaaagcttccgtccttcgtacccgaatgaatcggataaaaaggacgaaagcttatgtttcgcggtaccacctttatttgttattccatcgctgaaataaccttattcagtacgcattaaaagtaaatatgcttactgaacaattatcacaattaaagtcagtaagtaaggatatagtaatgtgctatcccatacttattaacaaaaaatcgtgcgtaaagaatccagtacgccatttaacatcaatgttaatactgtatcgctataacgggcgaacccgtagacacctcatattggcatcaacactccaaggccattttcaaacacgctttcaaaatcttctctcagctactaaagactctctgtataagcagggtgtgttttactttcctctttattgtgtttacgtttcattaaactgttataagatattaattagcttacagagtaaaaaaagatttgtcaacaattattcagaaaattttgatttaaaagttaatttgtttgtgaaattgtaattggtatcttgaagttgaaaaatgaattattttttaaataaagtgtggttaatggttgtctgactcatttagaatacataaaatatatttaactgttgttatcaaataaaaagtgatgtgagtgaattgtcaaaaagtgaagatcaacgtattactaaaacaaaagatgaacaaattaagcaaatagatatatcggatatcaaaccgaatccgtatcagccccgaaaaactttcgatgaaaatcatttaaatgatttggcagattcaattaagcaatatggaattttgcaaccaattgtgcttagaaaaacagttcaaggttattacattgtagttggtgaaagaaggtttagagcttcgaaaattgctggtctaaaatacgtatcagcgattatcaaagatttaacagatgaagatatgatggaactggcggtcatcgaaaatttacaacgagaagacttaaatgcgattgaagaagctgaaagttatcaacgtttgatgacagatttgaaaattacacaacaagaagtagcgaaacgattgagtaagtcgcgcccgtatatagcgaatatgttgaggttattacatttgccgaaaaagattgctgacatggtaaaagatgggcgactgacaagtgcacatggacgaacgttattggcaattaaagatgaacaacaaatgcttaggttagcgaaacgggttgttaaagaaaagtggagtgtcagatatttagaaaaccatgttaatgaattaaaaaatgtttcgtcaaagtcggaaacagacaaagtagatataactaagcctaaatttataaagcagcaagaacgacagttgcgagaacagtatggtaccaaagtagatatatcaataaaaaaatcggttggtaaaatctcatttgagtttgattcacaagaagattttgtgagaataattgaacaattaaatcgtaggtatggtaaatagttacacaattttatataataactctttgtgcaagtgtaaataaattgtaatcagtgaacatttgattctagatatattgagactttcgtaggttggaagtatataaaaatatgaatacaatattgatatatcatatagaagggagtaacgcttatcatgaatcaagtcatgaatattatttcatctctatttgagccattaacaaaaatagaaacatatgaaaacattgcaactaaaatcgctatgattgttatttatattatcgtagccctcatagttattaaaatactgaataaaatgattgaacagggatttaagattcaaaataaaagtaaaaagagtaacaaaaagcgctctaaaactttaatatctcttgttcaaaatgtagtgaagtatatcgtttggtttatagttattacgacgattttaagtaaatttggcattagtgttgaaggggtaattgccagtgctggtgtcgtaggcttagcagtaggttttggtgctcaaactatagttaaagacgtaattacaggattctttattatatttgaaagccaatttgatgtaggtgattatgttaagataaataacggtggtacaactgtagcagagggaacagttaaatcaattggacttcgttcaacacgaatcaatacaatttcaggagaattaacaattttaccaaatagtagtatgggtgaaataacgaactactcaattacaaatggtacagctatcgttaaaattccagtgtctgtcgaagaaaacattgataatgttgataaaaaactaaacaaactatttacttctttacgtagtaaatattacttatttgttagtgatccggttgttattggtattgatgctattgaagatacaagagtaatattgagaatatctgcagaaacaattccaggtgaaggatttgctggagctcgaattattcgcaaagaagtacaaaaaatgtttttacaagaaggtattaaaacacctcaaccaattatgactgcttataatcatagtgaaaacggtgtttagtagtttataatacatggaggtcatatttaatggcgtcaaaatatggaataaatgatatagtagaaatgaaaaaacaacatgcgtgtggaacaaaccgttttaagattattagaatgggtgcagacataagaattaaatgtgaaaattgtcaaagaagtattatgattccacgtcaaacgtttgataaaaaacttaaaaaaatcatcgaatctcatgatgatacacaaagataggagaatgattaatggctttaacagcaggtatcgttggattgccaaacgttggtaaatcaacattatttaatgcaataacaaaagcaggtgctttagcagcgaactatccattcgctacgattgatcctaatgtagggatagtagaagtgccagatgctagattacttaaattagaagaaatggttcaacctaaaaagacattgccgactacatttgaatttacagatatcgctggtattgtgaaaggtgcttcaaagggagaagggttaggtaataaattcttatcacatattagagaagtagatgcgatttgtcaggtcgttcgtgcatttgatgatgataacgtaactcatgttgctggtcgagtagaccctattgatgatattgaagttattaatatggaattagtactagcggacttagaatctgttgagaaacgtttgcctagaattgaaaaattagcacgtcaaaaagataagactgctgaaatggaagtacgtattttaacaactattaaagaagctttagaaaatggtaaacccgctcgtagtattgactttaatgaagaagatcaaaaatgggtgaatcaagcgcaattactgacttctaaaaaaatgctttatatcgctaatgttggtgaagatgaaattggtgatgatgataatgataaagtaaaagcgattcgtgaatatgcagcgcaagaagactctgaagtgattgttattagtgcaaaaattgaagaagaaattgctacattagatgatgaagataaagaaatgttcttagaagatttaggtatcgaagaaccaggattagatcgattaattagaacaacttatgaattattaggattatcaacatattttactgctggtgtgcaagaagtacgtgcttggacatttaaacaaggtatgactgcacctcaatgtgctggtatcattcatactgattttgaacgtggatttatccgtgccgaagtaacaagttatgacgactatgtacaatatggtggcgaaagtggcgctaaagaagcgggcagacaacgattagaaggtaaagaatatattatgcaagatggcgatatcgttcatttcagatttaatgtataaacgatagagtgaagttaattaaatagtatatatgtagaagaggcggaatcaattgttcgcctcttttaattatgcgtataatttattaaaagaatggaataattttactcgcgttaataatatcttgagtgctgaaaaattgtttgccttcgccagtataagcaggctctaaaacaagattagcctttgcacaataaagccattcaggatgaataccactattaagtatctcttggaattcttgaaaatctttagaccaatcaatatttaaattcattccttaccacctcacaactattatagaacatatgttcgcttttgtgaagtgtatttttaaaaatatcatagaaagtttcaaatgaattaatatcaaaaatgatatgaagagtagtttgaattattattgtaaaaagtaatggcgcatgatataattctttattgtgagtaatgaaaattattccttgcttatctgttttaagattgataagccgtatagaccacaaggaggtgcaaatataaaatgagaacatatgaagttatgtacatcgtacgcccaaacattgaggaagatgctaaaaaagcgttagttgaacgtttcaacggtatcttagctactgaaggtgcagaagttttagaagcaaaagactggggtaaacgtcgcctagcttatgaaatcaatgatttcaaagatggcttctacaacatcgtacgtgttaaatctgataacaacaaagctactgacgaattccaacgtctagctaaaatcagtgacgatatcattcgttacatggttattcgtgaagacgaagacaagtaataattagagggggcgtttaaatgctaaatagagttgtattagtaggtcgtttaacgaaagatccggaatacagaaccactccctcaggtgtgagtgtagcgacattcactcttgcagtaaatcgtacgttcacgaatgctcaaggggagcgcgaagcagattttattaactgtgttgtttttagaagacaagcagataatgtaaataactatttatctaaaggtagtttagctggtgtagatggtcgcttacaatcccgtaattatgaaaatcaagaaggtcgtcgtgtgtttgttactgaagttgtgtgtgatagcgttcaattccttgaacctaaaaatgcgcaacaaaatggtggccaacgtcaacaaaatgaattccaagattacggtcaaggattcggtggtcaacaatcaggacaaaacaattcgtacaataattcatcaaacacgaaacaatctgataatccatttgcaaatgcaaacggaccgattgatataagtgatgatgacttaccattctaataaaaattaacgaaattaaagcgaaaaaattatcaaaggaggcacacaatcatggcaggtggaccaagaagaggcggacgtcgtcgtaaaaaagtatgctatttcacagcaaatggtattacacatatcgactacaaagacactgaattattaaaacgttttatctcagaacgcggtaaaattttaccacgtcgtgtaactggtacttcagctaaatatcaacgtatgttgactacagctatcaaacgttctcgtcatatggcattattaccatatgttaaagaagaacaataatatataatttattgtcaaaccccgtaggcataggcttacggggctttttgtgttttggggtatagaaaaagggcaaaaaaggatgatgtgaatgttttgtgttcggaatttgcacaaagatatgtttatattgcaaaaataatatgaatttagatgcataaaaaaagaactacgcattttaaataaaatgcatagctcttctttttcttgcatacgaattaaaataactcgcgagacctataagtctctttcctcactagatagtttatacttttggtctgttgaagtcaataattttatctaaagctataaaaaatcttttgatagctaatgcattattataatagctttcgtttcttttatatcgcttttgaagttggtccaaatcgtgatatcttgcttggataattgcattactacaaacttgattatgtaattctagcgtagcgaaagtatctatgaaattttttattccgaacatgtttctagatatgcctatattattccctttttcaaataaatattgaggtaatctactgtcataatttagatttgctatgatgggttggttatgagctgatttgtttcttatatttttaactaaaggcattaaaatattagcaactctcaattcttcgtcattgtacttcttgtaatagaagttgagaaacgaaacgaattgacctagttgcatgaattcaatgcaaacccatgcgggtggattttgatagtatttattcaacttctcgggtagttgtcctcgtttattcatatgcttgaatatttcgtttttatttttgattttggtttccataacttcttctggtgttcttgaatttgtgtcaaaatttgaattgctatatgatttatcaatacataagaactcatctattattttataaccatcttcttggttattttctgttattagttttaagactagatactttaaactatgttcaatatctaaagttaaatgcaacattgtgtatcttaatttcatatctatagttgctaaatctgataaataagcaaattctatgaaatagccgccattctttttttcgaaattttttcggaaataagctagtttgaagaagtaattattttttctaagaatttcatttgctttttcggtgtcaataatattaaaaaatatattcatctgttttaattttgctatttgctcatcaaaattgagcataggcttaatttctgctagtgtatcatctttttccaattttaactccccaatcgttcaaatttattcatcatatctttcgccatctgattagtaacatgtgtgtatatctctagattttttttataatctgaatgacctacatgctcttgcattgcttttaagttaattcctaattgagcaagtgtagatatatgcgaatgatgtaatgtatgcgtcgttataggtttcttaatagaactaatatcagcgcccccctttaataatgtggctaattttgttcgagtcgatagggctaccagacgtatttgtgaatatgtactctctatcaataaacttatcattccaagcataagtgttcttagtaagtcgatgctttgggtagtgagccctgtggccttatagctattacttctttcagttgtctcctttactccgaatgctcccgtcttttttcagttatccaattaactttaccgtcgatatctagcgttttatcttcatagtttatatttactctctttattgcaagtagctcaccgatacgcatgtcattagcaatttgaaactgtaccatagcttttaccattttataattacgttttgtcgttggatatttttatacttaattacatagtcgaaacaatccagtaactccttaacttcattatcttctaatgtgttattatgtttagctagtaacgcatcactatagggatatctattttatctattacacatataactttgaattgcttgctattttaaattaacaaattttattctcttagattttgtccaattatgtgtagacgatttatagttattaaattcagagtggtagcaaattaaagttaatcaagagttaagatgaatttaattcatgaacacgtctattatttttataattgtagcaaataaagctttacatcaaggaggtaattaaatatgttcaaaaaatatgactcaaaaaattcaatcgtattaaaatctattctatcgctaggtatcatctatgggggaacatttggaatatatccaaaagcagacgcgtcaacacaaaattcctcaagtgtacaagataaacaattacaaaaagttgaagaagtaccaaataattcagaaaaagctttggttaaaaaactttacgatagatacagcaaggatacaataaatggaaaatctaataaatctaggaattgggtttattcagagagacctttaaatgaaaaccaagttcgtatacatttagaaggaacatacacagttgctggcagagtgtatacacctaagaggaatattactcttaataaagaagttgtcactttaaaagaattggatcatatcataagatttgctcatatttcctatggcttgtatatgggagaacatttgcctaaaggtaacatcgtcataaatacaaaagatggtggtaaatatacattagagtcgcataaagagctacaaaaagatagggaaaatgtaaaaattaatacagccgatataaaaaatgtaactttcaaacttgtgaaaagtgttaatgacattgaacaagtttgaaattaagctaaattagtatatatagtgttttatcgctaatactttgaaagttaggtatctaaaggtgcctagctttctttgttatgattagcaccatcatatagaaaattctttaatgacgtttatgccgaaatctacaaaaataatttctcttttatggttaatcaatatgtttttacattcgacaaccttaaaattaacttctttcaatttcataataaagtctctataaaataacttagtttaaaaacgattcgtatctttcagattcaaataccatcattttctcctaatacttacactttaattacaattatgtaagttgttttcagatacatcctattttatattttgtcagaggtgatcttttgaaaacgattttaaaaacaataacatatcttgtacttactatcattggcgcttatgctgctttattcattttaaaaacaatagactcccatggtataacagatcaatttaacccattagtaaagaaggatgattcttatgttaaaacgacagaggtgtctactagaatggatgatcaactccgaagttatagtcaaagtgtttttaataaagaagggaaagagacgcaattaatgtatactgctacatttgatgttaaaccgcatagatacttgaaaattacacataaaggtcatcatgtagaaacttttgaagaagttgaaaaggaagaagtaccaaagaaagcattagacaaactgagtcgataatagcatgcttatattacatggttcatttataaaaggagtacgaacgaaagtaacgcatgacgattaatttaaaaatatttgtaataattatgaataaaattaaaaacaaggggtaatacaatctatatagcatataagcttttgttatgagtttcaaaaataggaagagagagtgatattatgaaattaaaatcattagcagtgttatcaatgtcagcggtggtgcttactgcatgtggcaatgatactccaaaagatgaaacaaaatcaacagagtcaaatactaatcaagacactaatacaacaaaagatgttattgctttaaaagatgttaaaacaagcccagaagatgctgtgaaaaaagctgaagaaacttacaaaggccaaaagttgaaaggaatttcatttgaaaattctaatggtgaatgggcttataaagtgacgcaacaaaaatctggtgaagagtcagaagtacttgttgctgataaaaataaaaaagtgattaacaaaaagactgaaaaagaagatacaatgaatgaaaatgataactttaaatatagcgatgctatagattacaaaaaagccattaaagaaggacaaaaagaatttgatggtgatattaaagaatggtcacttgaaaaagatgatggcaaacttgtttacaatatcgatttgaaaaaaggtaataaaaaacaagaagttactgttgatgctaagaacggtaaagtattaaagagtgagcaagatcactaaaaagattcgttgcattaacgcttgtaaaatgtcttaattcatattaattaataaaataccctcacaacgtaatgtaatatatccagtatagatttgaaaggatatatgccaaacgtgttgtgagggtttatttgcatctatttatccatgcgaatatcgacttcttctaaatgtttctgatattctttaaccttactttctaaaaacatttcatatggtgcatcaaagaagtcagctaaatgcatggcatctttaaatttaggttcatggtgatgattctcccattcccaaatttgatgtgcttcatatttagtaccatatttctcatttaattgctgtgctaattcgtcaatttctaaattatgtttagttcgtaagttatataaaatatgcatattcattgttcattaacctcgcttcttgatttaaaattcaaagatgctctaataatatgtgtatattctagtcctataacataaaataatcaagctatgaattcggcagaaaaaataatgtaaatgtatatgatattatcggtacagagactttaaataacgatagctacattgaataaaattgatattcaattactacttttaaaaatatttggataaaaataatttgaatttgttttagaattgtaaataaggggtactacttagaataacgcaaaataaatagaaaaaggagactgaaaattatgtttggatttattggaatgttaattgtcggtggcttaattggatgggctgctggtgctattatgggtaaagatatcccaggtggtattttaggcaatattatcgcaggtattattggatcatgggtaggtggcaaactattcggacaatggggtcctgaattaggaagtatttacatcttgccagcattaattggttcaattatcttaattgcaatcgtaacgttaattttaagagctatgcgtaaataataaaaaaattcaattggaaattgaaataaagatggcattcagttgtcatcttttttatttgcgtgaaaatggtcaatatgtattataatatttgaaaatgtagataagataggattaaaaagtaataaattaatatgaggaaattttggaaataaaaaagcgagtatttgacaaataaaaaaaggatgacgttgggttgcgccatccaggagtattatgttcatgaatataaaagactgtgtagtcatttaagaactacacccatatagtaacacatcacttgattaaagacaatactatttttagagtcattaatttaaaatatgaattaattctttttttagaatagaatattaagattgatatcgaattagtagtcaaagtgttatggtagatatgaaatacataaggtaaggagtaatattatgacgatttatttagttagacatggcgaatcaaaatcgaattatgataataaacattttcgatcttatttttgtggacaattagatgtgccgttaacggatactggcacaaaaagtgcagacgatttatgtgattattttaaagagaaacagattaaacatgtatatgtttcagacttattaagaacacagcaaacgtttgaacatatttttccatatgacattgcatcaacgactacccctctattaagagaacgttcacttggcgtatttgagggtgaatataaagatgaaatcagtgcgaatccgaaatatgaaaaatatttcaatgatccaaactttaaagactttcgtcatagtttttcacaaaaagcgcctgaaggagaaagttatgaagatgtatatcaacgcgtagaacattttatgaatcatgttgtcaatgaagatacacaaaaagatgatattgtcattgttgcacatcaagttgtcattcgttgtttgatggtttattttaacaaagtttcaagggcagaagctgtggatttaaaggtagaaaattgcaaaccatatatcattgaatagaagtatagaggttctgaaaaactgtgttttatagcggccttcagaacctttttttcatttggaatttaaggggaatcattcttttcaacagacttaccaccaatggctaatgtgataattgtgcttgtgaacaaaataattgaagttataaatgacgctaatgtaaaaggtgtaaattgtgtgagcgataatatcaatgataaaaagaaccaagagatagcccctagaaattgtaaaatagcagaagaaattctaaaactcatataatcatatatagctaaaacaagtgaaggtaatgcgactaataccattataatgatgttgagggtgaataaatatggctgttcaaaagttactgtgtttggtcctgttggatgcattgctgctaagaacaagcaaacaatcgtcgataaaattgctaaaataataaaagtaattcgaactttcatcatgatcatcctttgtttatagagtcaatataagtatggaatatgttaggtatatagtcaaatgcgtcaactaatgggaattttggcatagatagagaatttaaggcaattaaaaaggcatcaaacagtaatatgctgcttgatgcccaaatgatgactttagctaaattgattagtcacttttaaagataaagaattgtcatgaattaaaactcatgtaatgatgtgttacatttcgcaatgatggctttcagttatttatcgataacatcactcttgatacctttagattttaagaaatctttaattttatcttgttgctttttattaacatcaccggcatattttgttggcacgtcgacaacattgattttattttgcggttgatagctaagcttttcaatatcttcatcaacattggcgattgtactatttaaagctttgaagtaattcatcattaattcaacgggtttcttatattctttaggaatattgttttcagtgacaaatttcttgaaatgcaaatcgtttttaacagctaagttagataagtggctaagtgtttctgcttgtttttcagtcacttttgtttgactgtcaatttgtttatctagtttatgttgcataatatatttgttatcaagtatatcgctatttacagacaaatacttttctatagcttgcttcatctctgcatcactaatatcactatttttcttatctgagttaaagatatcttttgtttctaattttttagcgcttttaggtgcatggatgccagtacttgtatgatgatcttcgttatcagattgatcggacgcgcaacctgtaagaattaatgtcgatgctaaaaatgtacttagtagtaatctctttttcataatgtaatataactccttagtttatctttaattgaaaaaatatgtattcatgtttaatagagtaacattgaattagtttggaatgtcacgatgaccttgcaatgaccatagacgtaaatgattacgtgcatgagttgctttttctatcaataatgcatcattttggacgttgttaaggatagctttatctataaataactgcataattggttgtactaatttagacgtaggtatcgtacgtaaaagcataataatttcgttcacatacttttctttctcaatatcatttttcatattgatttgtttgcgagaggtacatactttaagcattatcgcacatctcgttgtatatattaagtttatcataacatgattttatgtcgggataaaaaaataacagcatcttaacaaatgtaagatactgtcagtgaaatgaatgaaactttagtttctgataatatagtcaaaggcatttaatgctgcatttgcaccagcgcccattgaaatgataatttgtttgttcttctgatctgtgacatcgccagcagcaaatattccaggaacattcgtattattgttacgatcaatcacaatttcaccacgttcgtttaattcaacagcatcgtttaaccatgatgtgtttggaagtaaaccaatttgaacaaagataccatctaagttaagtagatgttcttcgccggtgttcatgtcttcgtaacgtatacctgtaacatggtcttctccgacaacttcagtagttttggcatttgttttgatatcaacatttgataaagaacgtaaacgatcttgtaacacgttgtctgcttttaattcgctagcgaattcgaataatgtaacatgattaacgataccagcaaggtcaattgctgcttcaaccccagagttaccgccaccgataactgctacgtctttattttcaaatagaggtccgtcacagtgagggcagaatgcaacacctttattaatcaattgctcttcacctggaatgtttagcttacgccaacctgcaccagtagcaataatgactgttttactttctaagacagcaccgttttctaacgtaactttaattgcttcgtcagtcttttcgatatctgtagcacgtatacctgtcattgcatcaatgtcatattgatcaatgtgcgctgctaagttagaagaaaattcagaaccagttgtttctttaacagtaatgaagttctcaataccagcagtatcattaacttggccaccgatacgatcagcaactataccagtacgtaaacctttacgtgctgtgtaaatcgctgcactaccactagcaggaccaccaccaacgattaagacatcataaggttctttattttcaaactcagatgcatctgccgtactgcctagtttcgaaagaatatcttggattgtcatacgaccattgccaaattcttcgccatttaaaaagacagcagggactgccatgatgttttcagattcttcacggaacactgcaccatcaatcatagaatgcgtgatgttagggttgatcacactcattaagttaagtgcttgaacgacatcaggacatttttgacacgttaaactaatgaatgtttcaaaatggaatgaaccttctaattttttaatttggtcaatgattgactgtttttctttaggtgcacgaccactaacctgtaaaattgctaaaacaagtgagttaaactcgtgacctaatggaatacctgcaaatgttacacctgtttcttcgccaggacgattgactgagaaacttggtgtacgttttaaagatttttcagaaagagatagtctaggtgacatatcagtaatttctgtcaacaaatctttaagttctttggatttatcatctgaaccaaggctggcaacgaattcaacgttgccctccattagttctaatagttgtttaagttgttgttttaaatcagcattaagcatggttgtaatgcctccttagattttacctactaaatctaaaccaggttgcaatgttttagcgccttcttcccatttagctgggcatacttcgccagggtttttacgaacatattgagctgctttgattttgtgagctaatgtactagcgtcacggccaattccgtcagcgttaatttcagatgcttgtacaacaccgtctgggtcgataatgaatgtaccacgttgagctaaaccagtagcttcatctaatacatcaaaattacgagtgattgtttgtgatgggtcaccaatcatagtgtaagtgattttgctaattgcatctgaatggtcatgccatgctttgtgtacgaagtgagtatcagttgatactgagaatacatttacgcctaatttttgtaattcttcatattggttttgtaagtcttctaattcagttggacaaacgaatgagaagtcagcaggatagaagcatactacgctccaagaaccttttaaatcttcttgtgtaacttctttaaattgatctttttttggatcgaaagcttgcgctgtaaatggtaagatttctttgttaattaatgacataaatatcttcctcctaagaatttaagtatgaattagaactatcaattgattgcgcttaattataataattctaatctcttagttagcattattacattttgatccagaatagtcaactggataactttgtaaagtgaatgattacttttaaaataaagaaagataatataaagtgctttgataatggattttgtagttgatgatttaaaaggttgtgtctatatttaatatcttgattttaatgtaaaaaatgtaaaaaaagaagatttgtattctcaactaagtcaaccttattgataatggtatgagaatatttgttcgagatggatgaaggtaatgagtgagaaactggatttttaaagtatgagacaatattttaaaaagttcaattattaacttataagcaaataattgctataaaaaagtttggacgtgtacaattgcaatatgaagattttaaattaattgtaaagtatcgaggagtgggtaacgtgtcagaacatgtatataatcttgtgaaaaagcatcattctgttagaaaatttaagaataaacctttaagtgaagacgttgttaagaaattggtagaagctggacaaagcgcttcgacgtcaagtttcctgcaagcatactcaattattggtatcgacgatgagaagattaaagaaaatttacgagaagtttctggacaaccttatgttgtagaaaatggctatttattcgtctttgttattgattattatcgtcatcatttagttgatcaacatgctgaaactgatatggaaaatgcatatggttcaacggaaggtttgctagtaggtgcaatcgatgcagcattagttgccgaaaatattgcggtaactgctgaagatatggggtatggcattgtctttttaggatcattaagaaatgatgttgaacgcgttcgagaaattttagacttacctgactatgtcttcccggtatttggtatggcagtaggggaacccgcagatgacgaaaatggtgcagccaagccacgcttaccatttgaccatgtcttccatcataataagtatcatgctgataaggaaacacagtatgcacaaatggcagattacgaccagacaatcagcgagtactatgatcaacgtacaaacgggaatcgcaaagaaacatggtcgcagcaaattgagatgttcctaggaaacaaagcaagattagatatgttagaacaattgcaaaaatcaggcttaatacagcgatagcaagataccaaaataacccgcccccctctagcttaaaatgataagtatagctagagggggcgggtatttcttgcaatgaattagtgtgaagttaatgcagcattatcatttgaatcgaaagtatctttatcccaatgtttagttaacttggcggtacctgtaccagctagcattgaatcgttcacgtttaatgctgttctacccatgtcaatcaatggttcaacggagatgagcacgccggctaaagcgactggcaagtttaacgttgacaacaccaatatggatgcaaatgtagccccgccaccgacgccagcaacgccgaatgaactaataatcacgacagcgattaacgttacaataaattgtaaatcaatttctacattagcgacgggtgcgaccataattgcaagcatggcagggtaaatgcctgcacaaccattttgtccaatcgacaatccaaatgtcgcagcgaaattggcaataccttctggcacgcctagacgtcttgtttgtgtttgtacattcaatggtaaggcacccgcgcttgagcgtgatgtgaatgcaaagattaatacttccaaagtctttttaacatagcgaattgggctaatacctaacaggcttaaaataattaagtgaatgatatacatcgtaattaatgcagcgtacgatgcgattaagaattttcctaaagtccaaatggcgccaaagtcacttgtcgataatgtgttggccataattgctaatacaccgtatggcgttaaacgtaagacgaacgtcacaatcgccattactagtgaatagatagcgtcaatcgcacgcttaagcaattcaccatgatcaggttgtttgcgtgctacgcgtaaataagcaaatcctataaacgaagcaaatatcacgacagcaatcgtggaagttgcacgttgtccagtgaaatctaagaatggatttttaggcaataattccaaaatttgttgtggtaacgtatgtgctgttaaatctttcgcttgtttagcaatttcgcttccacgtgcttgttcagcgttaccaaggttaattgttgatgcatctaaaccaaacaccaaggcatacacaacaccaacaatcgcagcaatggtgacagtgccaattaaaaagataaaaatgagactaccaattttagcaaacttttctccgatttgaattttagtgaatgcagctacaatagaaatgaaaattaaaggcataacaatcatttgcaacaatgcaacgtaaccttgtccgacaatgttgaaccagtcacttgttgatgtaataacattcgaatgtgtgccataaataagatgcaataacacaccgaatactataccaatccctaaagctgtaaacacacgtttcgcaaaagatatatgtttgcgagccatcatgtgcaatattacgatgaaaatcaccaatacaataatattaatcagtgtaagaaaagcattcatgaacgtcactccttaaatttttgaatataattccgactagtatgctaagaataatattaattttaaaatatttcaagagggcatttgcaattaaatgtaaacatgatgaaattcgaccgttggcataaggggatttgtaaacaaatcgttttgaattcagtagtgataggtggaaagggtaaatagtgtgatgagctagtcgattaaagttaatatttgaaaatgaagcagggcattaaatgcaataaattaaataagttgtcattaaagcattaataatagaaatgattttaacaggaaaaaagtgatgaatatttggaaaagatatatatcgtgcactgtcatgagagataagatatgagaaaacaaatttatccttgaatcgagatgtggctatggcggtttgataaaaattgctaacctcatatttattgaatgaaaagataataaatgatcaaccttgaaaagacgtttcgaacaaacacgttgtaaaaaattctgtcgaatcaaaattagcatcttttgagtgttcgtgtgtgcaggtggtagttcaaaagctaccgtaaacaaatatttttgtttgagcaaaaaggcgtttgtagtaaatgtgaatatgagtgtgcacttgtgcgattcgtcagttactaacacagccaaacatttaaattgaatggacttattaagatgaatctatttagaagtacacagaagccatcccatttaaaagtaacatactataaaaatttattcaaaattcaatattaatcataatgaataattaaaaaacctgaaacaaattagtttgatatgctctcttcaaagtagatattgaatggagtatatcagcttgtttcaggttttatgaattgagtattaaatttgaaagtaaattacagttctataggtttataaaaatcagtttttaaatcaaagctatatatgaattgagtattaaatttgtgttcaaatcacaagtttacaggttgaataaacgtgcgaagaaaccttttttctcttcttgaggttttggttctgacatttctgactgtgaagctgtgctgtcattttctgctttcgcttccaatgaatcgttcgaagtagcttgtttagaagcttctgcatgggcttctgctacttgttgttcagcatcatgttgcgcttctgcatctactgtagcttctttatttgaagtctcagctgcattgtcatttttagactgctcaacgctggctttttcaattgcttcagttgcagaaatttgatcctctttatctactttagtagcagtgccatcgcctgcattttctgctttagtatccgtcttagcgtctgttgatgtattcactccagcaaccttcgaatctttactgtcagctttatcttcagtaacagcattcttttcaactttatttgttgattcagctaatgcttttgcttgagaggcttgcgcttcttggatagcctcttgtgatgtttggatggcttttaaggattcgctatttgaatcgattttagatgtaagttgattttgaagttcttttaattcttgttgttgctgatgtacttgattcatcatttgaccaagtaggtgacgttcttcgcgcattttctggatttctaggcgtaaatcttctactagttgagcgacattttgattagtaggtaagtttttgtcatcgtttttgacaatgacttgcaggaagtctttttctttttctaattcatcaaacgctagatcataactatttgtttgttttactttgtcggcaatgtctttgaaaagctcgatatcttcttctttgaaatcagttgcttcacgaccacgatattcagtcttgcttagttggtaaccacgttcttctaaatgttgaacaattttacgtacttgcttctcacttagttctacgcgttgtgcaaattctttagttaacatactttaaagtcctttctgcatatactttatgtatactgacgtttgtctacgggcagtgaaacgtcagtcttgcttcatacatagtttaaacgttattgttagtgatttcaagtttgtttaaaatggtttacgtaaatccatttcttctaataaagcataaataatttcacgtgcgataccattggcaaatacatacttcaaaatataatttgatttaacacttgtaccgtagatatcctttgtcagtttaatatttttctttaaaaataagtccacttttttagtgtgaccatcattagttggatgaatgtaatcaatttcagtttgtctttcaaattgatgttcgtataaaaactgtctacggtgttcaataatgaggccgttatcttgtgttaaatctgcaggttctttagggacttccatcattaaaaagttaatacttctagaatgaacaaggtttgataataagtttagttcatgttcaatttgatgtaatgtttgcgtcattaactcatcatggttgggtaggtcttttgcgaataaataaattaaaaatgctgaattggttgtggcttcataatgtgcagttgctagactgacaacaacatcgttttctaagcctacgataaagacataatcgttttcggttttgttgttttctaatgagcgtttgatgatacgtttatcttcagttaaagataaatttaacttagtatcgtaaagtttaagtgcttcgttgtaatgtggatctttgacagattgaatggttttaaattccataagaacacctccccaatttaaataatattatagcataatcgcctgctgtaaaagactgttcataaacttttaaatggtataaaaaactgtactatcttaaattagacagtacagtaatctcattttgaattcagtgtgataactaagctttgggacctttagatgcttcagcaaaatgtgtaatatcaatctcttcataagctgaattattttcatgcacttcttgatgtgatgatttgtcacgaaccgctacaactaacattttatcgtctaaaataagttgtttatatttttctaattcatcaggcgctaagttgtagcgtgataaaactgcatgttcaccatcttctcctgttaacagtttagtcattctatcactaaatgttccacttgttgagataagggagatttcagagtcgtgtaagtcatttaggtgtaatttacttttactaataattgttagctctgattctaaataaccttcagatttcttttgattgattacgttgtataattcgccagtgtcatttactacagtaatatctgccatagttgtcgcccctttaaaaatttgtttatttaatcttttacccttcttattataaagtaaaacccttacattattaagttataagtcttcattcgcattaaacgtctctgtacatttataaaactattaaaagattacctaagcagttattgaaaaaatgccgaaaatttgctattatcgttaaataatttacataaactcatataatctaaagaatatggctttagaagtttctaccatgttgccttgaacgacatgactatgagtaacaacacaatactaggagtagcttcagccattaaattgtaaccatggtgggtgatttatatcattttatatgatggtcacagtttatttgatgaaacttcttttacattgattgcatgacaaattcgttatgcatgttcgttcactcataaaccctgaaactattatttagtttggggatttttttgtatctagcaccaatttaagagcaaaatgtttcacacaaatctgaggaggttttaagagtggagttactaggacaaaaagtaaaggaagacggcgttgtcattgatgagaagattttaaaagtcgatggatttttaaatcatcaaattgatgcaaagttaatgaatgaagttggtcgcactttttacgagcaatttaaagataaagggattactaaaatcttaaccattgaagcttccggtatcgcacctgcaatcatggctgcactgcattttgatgtgccatgtttatttgcgaaaaaagcaaaacctagcactttgacggatggttattatgaaacatctattcattcatttactaaaaataaaacaagtacggtcattgtttcaaaagagtttttatcagaagaagatactgtacttatcatcgatgactttttagcaaatggtgatgcttcattaggattatacgatatcgcacagcaagcgaatgctaagacagctggtattggtattgttgttgaaaagagtttccaaaatgggcatcaacgtttagaagaagcaggtttaacagtttcttctctctgcaaggttgcttcactagaaggaaacaaagtgacattggtgggagaagaataatgaaaaatttaatcctaagtgttcaacatcttttagctatgtacgcaggtgctatcttagttccaatcattgttggtacaagtttgaagtttacacctgaacaaatcgcttacttagttacagtagatatatttatgtgtggggttgccacatttttacaagccaataaagtaacaggaacaggattaccaatcgttcttggatgtacattcacggctgttgcgcccatgattttaattggtcaaacgaaaggaatagatgtactttatggttcgctatttttatcagggatattagttattatcatcgcgcctttcttttcacatcttgtaaaattcttcccaccagtagtaacgggtagtgttgttactatcattggtatcaatttaatgccagtagcaatgaattacttagctggaggtcaaggtgcaaaggactatggagatgttaagaacattttgttaggtttaatgacattaatcattattcttcttttacaaagattcacaactggatttattaagagtattgccatattaattggactcgttttaggaacgataggtgctggcttacttgggatggtcgatattaatcaagtcaatcatgccggttggttaggcatcccagtgccgtttagattctctggatttagctttgatgtgacatcgacgttagtgttctttattgtagctatcgttagtttaattgagtcgacaggtgtctatcatgcgttaagtgaaattaccggtaagaagttagaaagaaaagattttcgtaaaggttatactgcggaaggtctagcgatagtgttaggttctatattcaattcatttccgtatacagcctattcgcaaaatgtaggacttgtttctttatccggcgctaagaaaaacaatgttatatacggcatggtcgtgttattacttatatgtggttgtatacctaagcttggcgcattagcaaatatcataccgctacctgtgttaggcggtgcgatgatagctatgtttggcatggtaatggcatatggtgttagtatattaggacatatcgattttaaaaatcaaaacaatttattaattatcgctgtatcagtaggattaggtactggtataagcgctgtaccacaagcatttaaaggtttaggtgaacaatttgcatggttgactcaaaacggaattgttttaggcgcaatctctgcaattattcttaatttcttttttaatggaataaagtataaacaaacggaagaaaatgtgaaataatataactaattaatttgaaaaatggaggctgtttttaatgtgggaaagtaaatttgcaaaagaatcattaacgtttgatgatgtgttattaattccagcacaatctgatattttaccgaaagacgttgatttaagcgtacaattatcagacaaagttaaattaaatattccagttatttctgctggtatggatactgtaactgaatctaaaatggcgattgctatggctcgtcaaggtggtttaggtgttattcataaaaatatgggcgttgaagaacaagcggacgaagttcaaaaagtaaaacgctcagaaaatggtgtcatttcaaacccatttttcttaacgccagaagaaagcgtttatgaagcagaagcattaatgggtaaataccgtatttcaggtgtaccaattgttgataataaagaagatcgcaacttagtaggtattttaacaaaccgtgacttacgttttattgaagacttctcgattaaaattgtagatgtaatgacgcaagaaaatttaattacagctccagtgaatacaacacttgaagaagcagaaaaaattctccaaaaacataagattgaaaagttaccattagttaaagacggacgtctagaaggtcttattactattaaagatattgaaaaagttatcgaattccctaatgcagcaaaagatgaacatggtcgtctacttgtagccgcagcaattggtatttcaaaagatactgatattcgtgctcaaaaattagtcgaagcaggtgtggatgtcttagttatcgatacagcacatggtcactctaaaggtgttatcgatcaagtgaaacatattaagaagacttacccagaaatcacattagtagcaggtaacgtagcaactgcagaagcaacaaaagatttatttgaagcgggtgcagatattgttaaagttggtattggcccaggttcaatttgtacgacgcgtgttgtagcaggtgttggtgtaccacaaattacagcaatttatgattgtgcaactgaagcacgcaaacatggtaaagctatcattgctgatggtggtattaaattctcaggagatatcattaaagcattagctgctggtggacatgcggttatgttaggtagcttattagcaggtactgaagaaagcccaggcgcaacagaaattttccaaggtagacaatataaagtataccgtggtatgggctctttaggtgcgatggaaaaaggttcaaacgaccgttacttccaagaggacaaagcgcctaagaaatttgttcctgaaggtatcgaaggacgtacggcttataaaggtgcgttacaagatacaatttaccaattaatgggcggtgtgcgtgctggtatgggttatactggttcacacgatttaagagaattacgcgaagaagcacaatttacacgtatgggtcctgctggtttagcagaaagccatccacataatattcaaattacgaaagaatcaccgaactactcattctaattaagataaaggagaacgacaaatatggaaatggcaaaagaacaagagttaatccttgtcttagactttggtagccaatacaaccaattaattacacgccgaattcgtgaaatgggcgtttatagtgaattacacgatcatgaaatttcaattgaagaaattaagaaaatgaatccaaaaggtattatcttatcaggtggtccaaattcagtttatgaagaaggttcatttacaattgatccggaaatatataatttaggaattccagtacttggtatttgttacggcatgcaattaactactaaattattaggtggtaaagttgaacgtgccaatgaacgtgaatacggtaaagcaatcattaatgcgaagtcagatgagttattcgctggcttaccagcagaacaaactgtttggatgagtcattctgataaagttattgaaattccagaaggctttgaagttatcgctgatagcccaagcacagactatgcagcaatcgaagataagaaacgtcgcatttatggtgttcaattccatccagaagtacgtcatacagaatatggtaatgatttattaaataattttgtccgtcgtgtttgtgattgtagaggtcaatggacaatggaaaactttatcgaaatcgaaattgaaaagattcgtcaacgcgtaggagaccgtcgtgtattatgtgcgatgagtggcggcgtagattcatctgttgtagctgtactattgcataaagcaataggtgatcaactaacatgtatctttgtagaccatggcttacttcgtaaaggtgaaggcgacatggttatggagcaattcggtgaaggtttcaacatgaatattattcgtgttaatgcgaaagatcgctttatgaataaattaaaaggtgtttcagatcctgaacaaaaacgtaaaatcattggtaatgaatttgtatacgtatttgatgatgaagcatcaaaactgaaaggtgtagacttccttgcgcaaggaacactatatacagacgtcatcgaatcaggtactaaaacagcacaaacaatcaaatcacaccacaatgttggtggattaccagaagacatggaattcgaattaatcgaaccaatcaatacattgtttaaagatgaagtacgtaaattaggtattgagttaggtattccagaacatttagtatggagacaaccattcccaggacctggtcttggtattcgtgtacttggagaaattactgaagataaactagaaatcgttagagaatcagacgcgattttacgccaagtgattagagaagaaggtcttgaaagagaaatttggcaatacttcacagtgttaccaaacattcaatcagtaggtgttatgggagactaccgtacgtatgatcacacagtaggtattcgtgcagtaacatctatcgacggtatgacaagtgacttcgcacgcatcgattgggaagtcttacaaaagatttctagtcgtatcgtaaacgaagtagatcacgtcaaccgcgtagtctatgacattacatcaaaaccaccaagcacaattgagtgggaataattatatataataaaaccacctgtttgcacgggtggtttttaatttgagtagttggaaaattacaataaggacggaaaaggggtaaggtgttctaagtttgcgttttaattcatcaataaggcaattttccgtgtttatttttatataaaatttcatattgtttaggatcttcttgttttaaatcataaattatagtttcgtctactattttttctaattcaagtgtattaaagctccagtcatttgttgttattataaatattttttggactgggttgttatttatatgattaattagcctaggagtatctgtttctattattagagcagattctacaggatagtaaatagcaaagtctccgtgataaattgtgtttctttcatagaggttaacctctaaggttaaattactcaatttgaagattgtgttttgagttatatttttaggaataattcgattatctactatttgttttaggttgcctattgaacgagtgtgtatcgtcccttttgtgtaatcggaattatttaaagctcttaaaacagttgttaatttatactcgttaacataaccctttactaaagccatccgtttatcgctacctataaaatctttcagttttttgttgaattcattattgttgtgcataatattttatcctttccattagttgattgttttcatttgttcaaatctctatccatttactcggttacagggctgtgtatttgcagagtaatattatgattgaaataaccaacgcgttccgtattcgttttgagtgacgcagctagctgcgataatagtgacatgtggcttataacacattgtgtaatttattgtgtgttttgtgatgtctaatattgattgcagattgttgtatatttcacttaaagggcatttatataaaaaaagaggccagatgacgtatcatctgaccttcagctaaaacgctgagaatatgtcattcttcaagagaatgaagccggaatggttaccgggaatttgtaaatcaattatatcagatgtaatattacaattcaattagaaaagaactttatctttaattgcttttcgatttcattcatgtcatcttctgaaattattatcgttccagtaggatcagaatcatttattttgcttatacgtcttttgcttattgttgtaattgctgatatattaacgtatgtatctttccctttgtgcttggaataaacacctatcactctatacagttcattagctttttgatttaagttagacaaaagctttttatcttctgtgctaagtttaatgtcaatttctctatatttttgggctaatgcttgtactttactactgatatcgataatctgtttttttaaatctgttgctgttagatttagcaccgattcgtttaacttcaaataatttttattacctttggaagaaagtggaactattgtaactgtttcttttcctttattgtctttgttatctaatattacacaaaaatgattaccagaaaactcacttccaatattactccctagttttacatataccactgttcctctactatatgatttataatatctttttttattgcttgtaacatcgctatgtatagcaattgaataaaactctagccaatgaggcatgtatataactttcatgtttttactgtcggattttgaataagcttgttttagttttttgtttgacgtatttaatttactatttgcttgattgatatttttagacattaaatagtgttctcctaatcaatttattcttctttatatcagcattattagcactgaaattaacatgaatggtacgaaaatagatgttactataaaaccaacaatttttattaggtggaactcatcaattttgtatttagcaaatttcgcaatgacctgctatttattcgctttttatagttcatgtatgtgtaaaaaagtctatattgaacatctaattataagcgaattcctaatgctaaaagcaatctaacttacttaaatattattatgagtttttattgaaattaaataaatttaaactatttcttagtctctccatatcgttggaagttggttctttatataatcagataaattagaatcttcaagtaatgtatctttaaaaagttcagtttctaaatcaactttaaaatttgctttaaaacatcatgttccatttttaaatgttgaacttctttgcgtaattttattaactctttttcatcactttttaaattatcttgatgattgaagggtccagtattttggtgttgttttatcgaatttgagataattgagggttttaaatcatactttcgtataatttcattcttaagcttaccatttttatataatctaaccatttgtaacttaaactctgaactaaatgttcttctttcttttgtcataataaaattgactactttcttaatttaacaatatctattctcatagaatttgttcaattaagtgtagacgattcactgacacatcataagtacgtaaggaattttgatcgttcattgttattgctttatgttttagggaatgtgctattgaagggtttaaagatgtttgaaatgtcttggtttcttgacttatatagttatgaaagagggcgttgtcctttatagcatttctgagattagaaatgctataaataaagtgattaagattttttgttttcatgtaatttaagaaatggatttgttttttgtgggttatttttaattctgttcttaaatggtttgaattttgcgattgcaaatatgatagctgcttcttttgacaaagtaatagaacctttttcttctggtaccatgataatcactccttgtgcaattggatttaaatattataaaataattttactatacaaaatatattgtgtaaatagtttcttattgttaccaaataatatgtttggaagcgttatgtaatgccaatcaacaccgaagttctcatgtcctctttccttttacgactacatatattgttaataatattgaaataataaactgatagtgataatatttatttaactgatccatgagagtaggaaccccatcatacgggaatttcgaaatcatgggttttttgttttaaaggattgatgcaatagataaagtagccattctaatatatggagtatttatcagctgaaaattaaatcagatatgggttttcttcattaaataatttttttataaggaaacagaggcaacgctactgtcacctctgcttgaaataattaggatgaaatactctgagtctaaagtccacacacaattcgctcaaatcctccaaacctccgactacatctccacccccccaaacaccaatacttaccaaagcattgatatgagtgccaatactggcaatgtgccttgtttgaaaaagatactaatattgcttgaaaggccaccataaatagcaacgccaatgatatacactaaaatagctgcgcatatttcttttggattactgctgataaacaaaccgtatattagcaaaactccgattaaaccgttatatacgccttggttcttcaaaagtaggttaatatttttgtctttcaatttatcgacgcttatattaaatgtctcgctagtctttttggaagttgtagcaatcgtttcaaggtacataatatagaaaaactctaatgccacaaatatgattaaaattgttgagatgatattcactataacgctcctttattattaaatattttcttgtaaaaatgattgcagtgtctgtggttgatcattgactaattgttggaaatcattggattcttggtctaatagtcctcttgctcctgcgtcgtacattgatgccaataatgcaccaaagcctttaggttcatcatacatttctgcaaatgtctctaatgaaacgggctcatatttaatttctgtgcctgatgcctcagataaaattgcagcaagttctttcatatcataactgtagcctgataataagtagcgtttgccccaagtatctggatttttaataatagcaatgacacctctagcaatatcatttctagtaatataattaatacgaccatcgccagctggataaatcagtttatgcatattcatcaattctggtaaatatggtttaagtggatccatgtacattgccattcttacatacgtatagtcaatgccacttgttgccaatagacgtgctgcataaccaaaataaggactcatatggaatggattattatgctgatctgcgtaataacctatgaaaatgatatgagcaacgccgctctgctttgccgcatatactaaattttccacttcaggaatacgtttgaatgatggatggataatacttggaataaacacaacggtatccattcctttaaatgcttctaccatgctttcttgattaaaataatctaattgtcgaacaggaacttttccgcgccaatcttctggaactttctcaacatttctaacaccaatgtgaaaatgatctatgtgatttgcaatggcttgatttgtaatatgtgtgcctaaatgacctgtagcacctgttaacataatattcattcacttcatctcctaatctttatatacataacataatacttatttgatggttttcaaaacatttgattttataaaaaattctaatctgtatttattgtcgacgtgtatagtaaatacgtaaatattattaatgttgaaaatgccgtaatgacgcgttttagttgatgtgtatcactaatatcattgaaaattttaatcaggtactacgacaatatgatgtctgttttgtgtctgaaagttttacagtttttaaaataaaaatggtataaagtgtgatttgtataaaaaagagtctcgacggataagaattgattaataacagttagcattttattaattaccttaacaatgattcaagtttagttaaatgaggtttaatttgaaaggggatagcgcctcaatataatgtaggtagattgttcatattacgtaattgaaaaatcaaatttaaatagattggggctaaaaattatgaaatttaaagcgatagcaaaagcaagtttagcattgggaatgttagcaacaggtgtaattacatcgaatgtacaatcagtacaagcgaaagcagaagttaaacaacaaagtgaatcagagttaaaacactattataataaaccaattttagagcgtaaaaatgtgactggatttaaatatactgatgagggtaaacactatttagaagtcacagtagggcaacagcattctcgaatcactttacttggatctgataaagataaatttaaagacggagaaaactcaaatatagatgtgtttatccttagagaaggtgacagtagacaagcaacaaattactcaattggtggcgttacaaaatcaaatagtgtgcagtatattgattatatcaatacgccaattttagaaatcaagaaagataatgaagatgtacttaaagatttttactacatttcaaaagaagacatctcattaaaagaacttgattatagattaagagaacgtgcgattaaacaacacggcttgtattcaaatggtcttaaacaaggtcaaattacaattacaatgaatgatggcacaacacatacaatcgatttaagtcaaaaacttgaaaaagaacgtatgggtgagtcaatcgacggcactaagattaataaaattctagtagaaatgaaataatactttctaacaacaaagcgctatgttgaatagtgcttgttatggaaatatatggaagttaagcgacgtactgttgcttagcttctttttttgaggggaaaagttacaaaactcacacaaacagtcgcaccacgcattatcttttgcttaaatagcttaatcatattttatgaatagttaaaaacaggttaatgtgaatatccgaatacagctcctataatatgggtgtatgattcaaattacgtaataaaacaatctaattataatagattggagcatacaactatgaaaatgaaaaatattgcaaaaataagtttgttattaggaatattagcaacaggtgtaaacactacaacggaaaaaccagttcatgccgaaaagaaacctattgtaataagtgaaaatagcaaaaaattaaaagcttattataatcaacctagtattgaatataaaaatgtgacaggttatatcagtttcattcaaccaagtattaaatttatgaatatcatagatggtaattctgttaataatattgctttaattggcaaagataagcaacattatcatacgggtgtacatcgtaatcttaatatattttacgttaatgaggataagagatttgaaggtgcaaagtactctattgggggtatcacgagtgcaaacgataaagctgtcgacctaatagcagaagcaagagttattaaagaagatcatactggtgaatatgattatgactttttcccatttaaaatagataaagaagcgatgtcattgaaagagattgattttaaattaagaaaataccttattgataattatggtctttacggtgaaatgagtacaggaaaaattacagtcaaaaagaaatactatggaaagtatacatttgaattggataaaaagttacaagaagaccgtatgtccgatgttatcaatgtcacagatattgatagaattgaaatcaaagttataaaagcataacacatatacttgatgacgaaataagttgaaattgaaatagagaggttaagtgacgatcaaacgttgcttaacttctttttaatgcttaaaaattatttcaaaggcacatagaaacgctatattaatctcatactcactcattattttttgcttaaattacttaataatacttcaataattgttaaaaggggtttaatgtgattatcttagaacgccatctataatgatgttgtatgattcaaattacgtaaaaagacaatcgaatataatatagattggagcatacaattatgaaaatgagaacaattgctaaaaccagtttagcactagggcttttaacaacaggcgcaattacagtaacgacgcaatcggtcaaagcagaaaaaatacaatcaactaaagttgacaaagtaccaacgcttaaagcagagcgattagcaatgataaacataacagcaggtgcaaattcagcgacaacacaagcagctaacacaagacaagaacgcacgcctaaactcgaaaaggcaccaaatactaatgaggaaaaaacctcagcttccaaaatagaaaaaatatcacaacctaaacaagaagagcagaaaacgcttaatatatcagcaacgccagcgcctaaacaagaacaatcacaaacgacaaccgaatccacaacgccgaaaactaaagtgacaacacctccatcaacaaacacgccacaaccaatgcaatctactaaatcagacacaccacaatctccaaccataaaacaagcacaaacagatatgactcctaaatatgaagatttaagagcgtattatacaaaaccgagttttgaatttgaaaagcagtttggatttatgctcaaaccatggacgacggttaggtttatgaatgttattccaaataggttcatctataaaatagctttagttggaaaagatgagaaaaaatataaagatggaccttacgataatatcgatgtatttatcgttttagaagacaataaatatcaattgaaaaaatattctgtcggtggcatcacgaagactaatagtaaaaaagttaatcacaaagtagaattaagcattactaaaaaagataatcaaggtatgatttcacgcgatgtttcagaatacatgattactaaggaagagatttccttgaaagagcttgattttaaattgagaaaacaacttattgaaaaacataatctttacggtaacatgggttcaggaacaatcgttattaaaatgaaaaacggtgggaaatatacgtttgaattacacaaaaaactgcaagagcatcgtatggcagacgtcatagatggcactaatattgataacattgaagtgaatataaaataatcatgacattctctaaatagaagctgtcatcggaaaaacaagaagttaagtgacaacggtttacatgttgcttagcttcttttattatgcgtaatgatgtaaaaagacgaatattcatttgtttgtaaaagtggcatttctatgtcttaaaagtgacgaaacttcaaatgtgccaagtgttgaatcacatcaaaatcatttttatttaacgaacattatggatttcttaatttacttaacgatgattcaaatatagttaaacaaggtttaatgtgaatggagcaatacgccatctataataaagctgtatgattcaatgaatgtaatcgaacaaatctaataattacgaatggagcatacaactatgaaaataacaacgattgctaaaacaagtttagcactaggccttttaacaacaggtgtaatcacaacgacaacgcaagcagcaaacgcgacaacactatcttccactaaagtggaagcaccacaatcaacaccgccctcaactaaaatagaagcaccgcaatcaaaaccaaacgcgacaacaccgccctcaactaaagtagaagcaccgcaacaaacagcaaatgcgacaacaccgccttcaactaaagtgacaacacctccatcaacaaacacgccacaaccaatgcaatctactaaatcagacacaccacaatcgccaaccacaaaacaagtaccaacagaaataaatcctaaatttaaagatttaagagcgtattatacgaaaccaagtttagaatttaaaaatgagattggtattattttaaaaaaatggacgacaataagatttatgaatgttgtcccagattatttcatatataaaattgctttagttggtaaagatgataaaaaatatggtgaaggagtacataggaatgtcgatgtatttgtcgttttagaagaaaataattacaatctggaaaaatattctgtcggtggtatcacaaagagtaatagtaaaaaagttgatcacaaagcaggagtaagaattactaaggaagataataaaggtacaatctctcatgatgtttcagaattcaagattactaaagaacagatttccttgaaagaacttgattttaaattgagaaaacaacttattgaaaaaaataatctgtacggtaacgttggttcaggtaaaattgttattaaaatgaaaaacggtggaaagtacacgtttgaattgcacaaaaaattacaagaaaatcgcatggcagatgtcatagatggcactaatattgataacattgaagtgaatataaaataatcatgacattctctaaatagaagctgtcatcggaaaaacaagaagttaagtgacaacggcctacatgttgcttagcttcttttgttatgttcgatgatttgagaacccgaattttcgatgggtccaaatatgacgtggaagagacctgaatttatctgtaaatccctatctatcgggtgtgaagcacaacgggatcagttttatttaacgaacattatagattccttaatttacttaataatgattcaatgattattaaacatggtttaatgtgaaaggtcaaatacgctaactataataaagctgtatgattcaatagacgtaagcgaacaaatctaataattacgaatggagcatacaactatgaaaatgacagcaattgcgaaagcaagtttagcattaggtattttagcaacaggaacaataacgtcattgcatcaaactgtaaatgcgagtgaacataaagcaaaatatgaaaatgtgacaaaagatatctttgacttaagagattactatagtggcgcaagtaaggaacttaaaaatgttactggttatcgttatagcaaaggtggcaagcattaccttatctttgataaaaatagaaaattcacaagagtacagatatttggtaaagatattgaaagatttaaagcacgtaaaaatccgggattagacatatttgttgttaaagaagcggaaaaccgtaatggcacagtgttttcatatggtggtgtcactaagaaaaatcaagacgcttattatgattatataaacgcaccaagatttcaaatcaagagagatgaaggtgacggtattgctacgtacggtagagtacactacatttataaagaagagatttcacttaaagaactcgactttaaattgagacagtatttaattcaaaattttgatctgtataaaaagtttcctaaagatagtaagataaaagtgataatgaaagatggcggctattatacgtttgaacttaataaaaaattacaaacaaatcgcatgagtgacgtcattgacggtagaaatattgaaaaaatagaagccaacattagataattcaatgaaatatggataatagtaaaatatggatagtatagaggagttaggcaacataagttgcttagcttcttttttgtgttggagagatgaaaatgaagcgtatcgatgaataataaaaacaccaataaaacttgtggaaatagttgatacttatagtcgcgcgttgtccttttcgtgacatgaaacaatgtggaaaacatagttaaattgagggaaagtgtgaatagttaaaaaagctgcgttaagtttaaaaaatagattaacgctgttaggattccattaattagcttaacattggttcaaaaatagttaaaaagaggttaattcatagcttagtattacgcttatataatgatagtagattgttcgtattacgtaattgaaataatcatataaaaatatattaagacaaaatttataaatagattgggagaatagtactatgaaattaaaaacgttagctaaagcaacattagtattgggattgttagctactggtgtaataacaacagaaagtcaaacagtaaaagcggcagaatcaactcaaggtcaacacaattataaatcgttaaaatactactatagcaagccaagtatagagttaaaaaatcttgatggtttgtatagacagaaagtgacagataaaggagtatatgtttggaaggatcgaaaagattattttgttggcttgcttggtaaagatattgaaaaataccctcaaggtgagcatgataagcaagatgcatttttagtcatcgaggaggaaactgttaatggaagacaatattcaattggtggtttaagtaagacaaatagtaaagaatttagtaaagaagtcgatgttaaagtaacaagaaaaattgatgaatcatcggaaaagtctaaagatagtaaatttaaaattactaaagaagaaatctcgttaaaagagttggactttaaattaagaaaaaaattgatggaagaagaaaaattatatggtgctgttaataatagaaaaggtaaaattgtagttaaaatggaagatgataagttttatactttcgaacttacaaaaaaactacaaccgcatcgcatgggtgacacgatagatggtaccaaaatcaaagaaattaatgttgagctagaatataaataatctttggacaagcagactagtaattgtagggaagttaagcgataacatattgcttagcttcttttttattttgttatgatgaaaaaaggagcgggtttatgatcaagtttttggaaaaacggttgatacttatagtcgcgcgttgtccttttcgtgacatgaaacaatgtggaaaacataattaaattgagggaaagtgtgaatagttaaaaaattagtattgtgttataaaaaataattaatactgttaggatttcattaactaacttaacgttggttcaaaaatagttaaaaagaggttaattcatagcgcagtatctcacttatataatgatagtagattgttcgtattacgtaattgaattaatcatataaaaatatattaagacaaatttataaatagattgggagaatagtactgtgaaattaaaaacgttagctaaagcaacattggcattaggcttattaactactggtgtgattacatcagaaggccaagcagttcaagcaaaagaaaagcaagagagagtacaacatttatatgatattaaagacttacatcgatactactcatcagaaagttttgaattcagtaatattagtggtaaggttgaaaattataacggttctaacgttgtacgctttaaccaagaaaatcaaaatcaccaattattcttattaggtaaagataaagagaaatataaagaaggcattgaaggcaaagatgtctttgtggtaaaagaattaattgatccaaacggtagattatctactgttggtggtgtgactaagaaaaataacaaatcttctgaaactaatacacatttatttgttaataaagtgtatggcggaaatttagatgcatcaattgactcattttcaattaataaagaagaagtttcactgaaagaacttgatttcaaaattagacaacatttagttaaaaattatggtttatataaaggtacgactaaatacggtaagatcactatcaatttgaaagatggagaaaagcaagaaattgatttaggtgataaattgcaattcgagcgcatgggtgatgtgttgaatagtaaggatattaataagattgaagtgactttgaaacaaatttaaagtaagtaatcaatgactctaaagtaataaatttgaagcagcttaacgatgaaatgttgaatagatacgtacaccttacattaaggagcgtatttaaaacaaccttgtcgttaggcttttttttacgttttataacgcaggttatgagtgagcatactaaaaatttacattgctcttgaaagtgatgcccattgaatattaattagctcttcattaacaatgatttaagtttaattaaacgagtgttaatgtcagtctgtctcaatgccctttataataaaggtgtattattcaaattacgtaataaaagcaatccaatatattaagattggagcacatgaatatgaaatttacagtgatagctaaagcgatatttatattaggaatattaacaacaagtgtaatgataacagaaaatcaatcggttaatgcaaaaggaaagtatgaaaaaatgaaccgtttatatgatacaaacaagttacatcaatactattcaggacctagttatgagttaacaaatgttagtggccaaagtcaaggttattatgactctaacgttttgctttttaaccaacaaaatcaaaagttccaagtgtttttattgggaaaagatgaaaataaatacaaagaaaaaacacatggtttagatgtctttgcggtaccagaattagtagatttagatggaagaatatttagtgttagtggtgtaacaaagaaaaacgtaaaatcaatatttgagtctctaagaacgccgaacttactagttaaaaaaatagacgataaagacggtttttctattgatgaatttttctttattcaaaaggaagaagtgtcattgaaggaacttgattttaaaataagaaaactgttgattaaaaaatacaaactgtatgaagggtcagctgataaaggtagaattgttattaatatgaaagatgaaaataagtatgaaattgatttaagtgataaattagatttcgagcgtatggcagatgtcattaatagtgaacaaattaaaaacatcgaagtgaatttgaaataatcaatgatatatatagaatgaaagcttaagaagcggtttaataatcccatgtttaatgattttgatacgtgtttttataataaaaacatatcgaacattgactacgttattaagctgcttttttgtacactttataaccaatagcttaagatttaaaactaatcggaaagaacaatgattcaccaaaaaaatatttatgttgctattaaaaatcagttaatacgaatgttaaaatacgtttgattttcattaataatgattcaagtttatttaaatgagcgttaatgtcagtctgttttgatgcaccttataataaagacagatagttcaaattacgtaataataacaatccaatacattaagattggagcaaaaaaatatgaaattaacaacgatagctaaagcaacattagcattaggaatattaactacaggtgtgtttacagcagaaagtcaaactggtcacgcgaaagtagaacttgatgagacacaacgcaaatattatatcaatatgctacatcaatactattctgaagaaagttttgaaccaacaaacattagtgttaaaagtgaagattactatggctctaacgttttaaactttaaacaacgaaataaagcttttaaagtatttttacttggtgacgataaaaataaatataaagaaaaaacacatggccttgatgtctttgcagtacctgaattaatagatataaaaggtggcatatatagcgttggcggtataacaaagaaaaatgtgagatcagtgtttggatttgtaagtaatccaagtctacaagttaaaaaagttgatgctaaaaatggcttttcgataaacgagttgttttttattcaaaaggaagaagtatcattgaaggaactggactttaaaataagaaaactcttaatcgaaaaatatagattgtataaaggaacgtctgataaaggtagaattgttatcaatatgaaagacgaaaagaagcatgaaattgatttaagtgaaaaattaagttttgaacgtatgtttgatgtaatggatagtaagcaaattaaaaatattgaagtgaatttgaattagttcgagttaatagcataatagcttaagaagcggcttaacgacaaaatgtgaattggcatttgtgtccttatataaggaactgtgttaaatacattactgttgttaagttgtttttgtaattcaaagagcagaacagagtaacatcatcagttgtagtaaacgataatccggtaaaacaactaaatgaaataatgaaagtcatttaacctgaacattaaaatatatttgtttttcattaagaataattcaagtatatttaaatcgaggttaattatcgtatgaaacgatgcacgttataataaaaatgtatgattcaaattacgtaatgaaaacaatccaatatattaagattggagcaaataaatatgaaatttacagcattagcaaaagcgacattagctttaggaattttaacaacaggaactttaacaacagaagttcattcaggtcatgcaaaacaaaatcaaaagtcagtaaataaacatgacaaggaagcattataccgatactacactggaaagactatggaaatgaaaaatattagtgctttgaaacatggtaaaaacaacttacgttttaagtttagaggtattaagattcaagttttactgcctggaaatgataaaagtaaatttcaacagcgtagttatgaggggttagatgttttctttgttcaagaaaaaagagataagcacgatatattttatactgttggtggtgtaatacagaataataaaacatctggagttgtcagtgcaccaatattaaatatttcaaaagaaaagggtgaagatgcttttgtgaaaggttacccttattacattaaaaaagaaaaaataacactaaaagaactggattataagttgagaaagcatctaattgaaaaatacggactttataaaacaatctcaaaagatggtagggtcaaaattagcttgaaagatggcagtttttataaccttgatttaagatctaaattaaaatttaaatatatgggggaagtcatagaaagcaaacaaattaaagatattgaagttaacttaaagtaaatcattacgaataattaaaagtaattgaagcggcttaacggtgaaatgtaaattggtgcgcatagcttatacaaaaaggatgcatcaatcgatatcgtcgttaagccgttttggtttgtgtgtcatgaatcctatcccaatctccataaaggtaaaatttccaccaccaacatcaaaattctccacatcgcaacataaccaaatgttataataaatctattacacaaagagataaattacttattcaaaggcggaggaatcacatgtctattactgaaaaacaacgtcagcaacaagctgaattacataaaaaattatggtcgattgcgaatgatttaagagggaatatggatgcgagtgaattccgtaattacattttaggcttgattttctatcgcttcttatctgaaaaagcggaacaagaatatgcagatgccttgtcaggtgaagacatcacgtatcaagaagcatgggcagacgaagaataccgtgaagacttaaaagcagaattaattgaccaagtcggttacttcattgagccagaagatttattcagtgcgatgattcgtgaaattgaaacgcaagatttcgatatcgaacacctggcgacggcaattcgtaaagttgaaacatcaacattaggtgaagaaagtgaaaatgactttatcggtctgttcagcgatatggatttgagttcaacgcgactaggtaacaatgtcaaagaacgtactgctttaatctctaaagtcatggttaatcttgacgacttaccattcgttcacagtgacatggaaattgatatgttaggtgatgcatatgaattcctaattgggcgctttgcggcgacagcgggtaaaaaagcaggcgagttctatacaccacaacaagtatctaagatactggcgaagattgtcacagacggtaaagataaattacgtcacgtgtatgacccaacatgtggttcaggttcactgttgttacgtgttggtaaagaaacacaagtgtatcgttatttcggtcaagaacgtaacaatactacatacaacttagcacgcatgaatatgttattacatgatgtgcgttatgagaacttcgatatccgtaatgatgacacattggaaaacccagcctttttaggcaatacatttgatgcggttattgcgaacccaccgtatagtgcgaaatggactgcagattcaaagtttgaaaatgacgaacgattcagtggttacggcaaacttgcgcctaagtctaaagcagactttgcctttattcaacacatggtacattacctagacgatgaaggtaccatggccgttgtactcccacatggtgtattattccgaggtgctgcagaaggtgtcattcgtcgttatttaattgaagaaaagaactacttagaagctgtgattggtttgccagcgaatattttctatgggacaagtattccaacatgtattttagtatttaaaaaatgtcgccaacaagacgacaacgtactatttatcgatgcatccaatgattttgaaaaaggaaaaaatcaaaatcatttaagcgatgcccaagtcgaacgtattatagacacatataagcgtaaggaaacaattgataaatatagctacagcgcgacactacaagagattgccgataacgattacaacctaaatataccgagatatgtcgatacattcgaagaagaagcaccgattgatttagatcaagtccaacaagatttgaaaaatatcgataaagaaatcgcagaaattgagcaagaaatcaatgcatacctgaaagaacttggggtgttgaaagatgagtaatacacaaaagaaaaatgtgccagaattgaggttcccagggtttgaaggcgaatgggaagagaagcagttaggggatcttacagatagagtaattaggaaaaataaaaacttagaatcgaaaaagcctttaacaatatccggacagttaggtttaattgatcaaacagaatattttagtaaatcagtttcgtcgaaaaatctagaaaattatacactaataaagaatggagaattcgcgtataacaaaagttattctaatggatacccattaggggctattaaaagattaactagatatgatagtggtgtattgtcctctttgtatatttgtttttctattaaaagtgaaatgtctaaagacttcatggaagcatattttgattcgacacactggtatagagaagtttctggaattgcagttgagggtgcaagaaatcacggattattaaatgtttctgtgaatgatttttttactattctaattaaatatccaagtttagaagaacagcaaaaaataggcaagttcttcagcaaactcgaccgacaaattgaattagaagaacaaaagcttgaattacttcaacaacagaaaaaaggctatatgcagaaaattttctcacaggaactgcgattcaaagatgagaatggtgaagattatccagattgggaaaatagcaaaatagaaaaatatttaaaagagagaaacgaacgttctgacaaagggcaaatgctttcagtaactataaatagtggcattataaaatttagtgaattggatagaaaagataattcaagtaaagataaaagtaattataaagtagttaggaaaaatgatattgcatataattctatgagaatgtggcaaggggctagtggtaaatcaaattataatgggattgttagccctgcatatactgtgctttatccaacacaaaatactagctcattatttattggatataagtttaaaacacatagaatgattcataaatttaaaattaattcacaaggattaacatcagatacatggaacttaaaatataaacaattaaaaaatataaatatagatatacctgtattggaggaacaagaaaagataggtgatttctttaaaaaaatggatatattgataagtaaacagaaaatgaaaattgaaatattagaaaaagagaaacaatcctttttacaaaaaatgttcttataactttgataaatacatagattgcataagaataaaatttgtataatttaacataaaagttgtaaaagtaaagtgaattaaaaacgaacattaaatttaggcactgtgaaagcgcagtgtcttttttgtgtcgaaattgtgtacagaataagtagttaaataaagattaagttgagataaagtgttattcgtaaataaaagagagtagatcgataggaattgaatgatattagttaactatttattaaattacttaataatgattaatttttagttaaagtaagtttaatgtgaagcacgaccattgctcattataatgaatgaggattgttcgtattgcgtaatagaataaatcaaatagactaaaaattgggagcatagaattatgaaattaaaaaatattgctaaagcaagtttagcactagggattttaacaacagggatgattacaactactgctcagccagtaaaagcaagtacattagaggttagatcacaagctactcaagacttgagtgaatattataatagaccgttctttgagtatacaaatcagtcaggatataaagaggaaggaaaagtgacgtttactcctaattatcaacttatagatgtaactttaactgggaatgaaaagcaaaattttggtgaagatatttctaatgtagatatatttgttgtaagagaaaattctgatagatctggtaatacagcttcaattggtggtattactaaaacaaacggttcaaattatattgataaagtaaaagatgtaaatttaataattactaaaaacatcgatagtgttacatcaacgtcaacatcatctacatatacaattaataaagaagaaatttcattaaaagaacttgattttaaattaagaaagcatttaattgataaacataacctttataagacagaacctaaagacagtaaaattcgaattactatgaaagatggtgggttctacacatttgaattgaataaaaagttacaaacacaccgtatgggtgatgttattgatggcagaaatatagaaaaaattgaagtgaatttataaaattattcgagggagcatatcatgagggaaaattttaagttacgtaaaatgaaagtcggtttagtatctgttgcaattacaatgttatatattatgacaaacggacaagcagaagcatctgaaaatcaaaacgctttaatctctaatataaatgtagacaatcaggaaaaacagaataatgtaaatcaagctgttcagcctcaaaataatactaatgaaacatcaaaagtaccggctaattttgtcaaattgaatgatattaaaccaggtgatacttctatacaaggaacaactttaccaaatcaatttatactattaactattgataaaaaagatgtgagctcagttgaagattctgacagcagctttgttatgtctgataaagatgggaattttaagtatgacttaaatggtcgcaaaattgttcataatcaagaaattgaagtgtcttcatcagatccctatttaggtgacgatgaagaagatgaagaagtagaagaaacttcaactgaagaagttggtgctgaggaagaaagtacagaagctaaagctacatatacaacaccgcgatatgaaaaagcgtatgaaataccgaaagaacagctaaaagaaaaagatggacatcaccaagtttttatcgaacctattactgaaggttcaggtattattaaaggccatacctctgtaaaaggtaaagttgctctatctattaataataaatttattaactttgagacaaatgctaatggtggtccaaataaagaagaagcgaaatctggatcagaaggaatctggatgcctattgatgacaaaggatactttaattttgacttcaaaacgaaacgtttcgatgatttagagttaaagaaaaatgatgagatctcattaacatttgcacctgatgacgaagatgaggcattgaagtcattaattttcaaaactaaggtaacgagtttagaagatattgataaagcagaaactaaatatgaccatactaaagtggaaaaagtaaaagtattgaaagatgttaaagaagatttacatgtagatgaaatttacggaagcttatatcatacagaaaaaggtaaaggtattcttgataaagaaggtactaaagtaattaaaggtaagactaaattcgcaaatgcagttgtgaaggtagactctgaactaggtgaaggtcaagaattccctgatttgcaagtcgatgaaaaaggtgaattcagctttgatgtagatcatgctggatttagattacaaaatggagaaacactaaacttcacagtagttgatcctattacaggtgaattattaagtggaaattttgtttctaaaaacatagatatttatgaatctcctgaagaaaaagcagatcgtgagtttgatgaaagaatggaaaacacacctgcatatcataaattacatggtgataaaattgtcggctacgatactaacggattcccgattacctggttttatccattaggtgaaaagaaagttgaacgtaaggcaccaaaattagaaaaataattaaataaaacagcttaatgatgtaatgaaattagtgagttaatcactgacttctacgtcattgagctgtttttttgtgctttgttacaaagcattattgaatttattttacgtgttcatattttgaaacatcaaagccgtcttgtttagctttgttgataatgtctttgattgaatgtagtcctttatcggcgaagtatgatcttaagttgtcttttgtagcttggtcagcattcttatctaataacacatcaatataacttaattcatgttctaagaagtttgcatcatcatgtagtacgagtccattttgagaataaactttcgcatctgcttgattaccatatccaacaacgccagttgctaaaacacctaccattgccgtagctactaaaacctttttaaatttcatatctatcactcctctaaaaattgtaactccatcataacactgaatattaagaaaattacgtttattaagtcgatttaataatttttaataaatagttaaagtgacaaatattgtttaaatgcaattaatctttaatacgatgcttgaggatttttcctaataaaaccttgatttcaaaaagggtttaaatcaaatgaaacaataataaaaaaatgacgcaatataataataagtacaaatttaattaagaaattaaattgattgtatatgtatattttggtaacgtaaaagagaaatatacaaaataattaattatttatatgaaaagagaatataaatgaagtataaaacagagagacgtgaagcgatgggatatttaaaaaggtttgcattgtacataagcgttatgattttaatatttgcgatagcaggttgtggcaaaggtaatgaaacaaaagaagattcaaaggaagaacaaatcaaaaagagctttgcgaaaacattagatatgtatccaattaagaatctcgaggacttatacgacaaagaaggataccgagatggcgaatttaaaaagggtgataaagggatgtggacgatatatacagatttcgccaaaagtaataaacaaggtggattgagtaatgaaggtatggtcttatacttagatagaaatacacggactgcaaagggacattattttgttaagacattctataataagggcaaattcccagatagaaaaaattataaagttgaaatgaaaaataataaaattatcttattagataaagtagaagatacaaatctaaaaaagagaatagaaaactttaaattttttggacaatatgcaaaccttaaagaattgaaaaactacaacaatggtgatgtctcaattaatgagaatgttccaagttatgacgcaaaatttaaaatgagcaataaagatgaaaatgttaagcaattaagaagtcgttataatattcctactgataaagcaccggtattaaaaatgcatattgatggtaatttgaaaggaagttctgtgggttataaaaagttggaaattgacttttcaaaaggtggaaaaagcgatttgtcagtaatagattctttgaatttccagccggcgaaggtagatgaagatgatgaatgatgaggatggtgtgtaacaatgaagtctataaaaaggattggattgtgcattagtttgttgattttaatcatctttgttacatcttgtgatggtgataataagatcattggagattcaaaagaagaacaaatcaaaaagagctttgcgaaaacgttagatatctaccctattaagaatctcgaggatttatacgacaaagaaggatatcgagatggcgaatttaaaaaagatgataaaggtacttggctaattagatctgaaatgaaaatccaattaaaaggagaaaatctggaatctagaggagcagttttagaaattaacagaaatactagaacggctaaagggcattatattgttagagaagttgttgaagatagcgatggaatgacacacaatcatacaaaaagatatcctgtgaaaatggaaaataataaaatgattccattaaaaccaatcgatgacgaaaaagtaaaaaaagaaatcgaagaatttaacttctttgtacaatacgggaatttcaaagaattggaaaactataaagaggacgaagtgtcatataacccagaagtaccaatttactctgcaaaatatcaattgaaaaacagtgattacaatgttgaacaattaaggaagcgatataatatcccgacgcaaaaagcgcccaaattattattgaaaggctcaggtaatttaaaaggttcatcagtcggatataaaaatattgaatttacctttattgaaaacaaggaagaaaatatttacttcacagatagtatctactttaatccaagcgaggataaataaatataattactaatataaaaaataacgttagaacatttaataataaagttaaaatgaattacatgtattaaattgaataagttagttttgtttgataacataaaagttgaataatcactattttaataagttgtatgaaatattcaaatgtttataaaattaaaacagagagatgtgaaatgatggagtatataaaaaaaattgctttgtacatgagtgtattacttttaatcatttttattgggggatgtggaaatatgaaagatgaacagaaaaaagaggaacaaacgaataaaacagattcaaaagaagaacaaatcaaaaagagttttgcgaaaacgttagatatgtatccaattaagaatctcgaggatttatacgacaaagaaggatatcgagatggtgagtttaaaaaaggcgataaaggtacgtggactatacttacaggtttttcaaaaagtaacaaaccaggagtattagatgatgaaggcatggtgttatatcttaatagaaataccaaaaaggcaacaggttattattttgtaaataaagtttatgatgatattagcaaaaatcataatgagaaaaaatatcgtgttgaactaaaaaataataagattgttcttttggataatgtagaagacaaaaaacttaaacaaaaaattgaaaattttaaattttttagtcagtatgctgattttaaagatttaaaaaattatcaagatggaaatataacaactaatgaaaacgtaccgagctatgaagcacaatataaaatgaacaatagtgataaaaatgtaaaaaaacttagagaaatttatccaattacaactaataactctccaaatctaaaattatatatagatggtgatataaaaggaagctcagtaggatataaaaaaatagaatataaattttcaaaagataaaggtcaagagacaacattaagagattatttgaattttggaccgtctgaaggtgagaatgttgagtaggaagtataaaatagatttaaaagcaattaatcaaaatactgagtctacaagtgctatttcgaaagcgtcatacgaagttgagaatgctaataataatggtctatcaaaaagagacgtgattaatcaatttaatgatttgaaaaaaatgaaaaaattcccttctaatcttgaatatgttgatagttacactgattctcttactggagtaacaacttctgcttttttaaataaagatacaggcaaagtaactctcgggatgactgggactaatttacaagacgaagcctttaaaaagttaaaagaaggtgaattttcaagacaaaatgttaccaatgctttggaaacagttaaagatggatatgcagatcttaaaatattatattctcctgcatctgatcaaaactatagatatgcgaatacacaagaatttataaataaaataaaaagtaagtatgacattgattttattactggacattcactaggtggaagagatgcggtagttctaggaatgagtaatggtattccgaacattgtggtttataatccagctcctatttctataactagtttgaatcctaattccccagatggaaaacgtttattagaattatataaaaattataaaggtaatattactaggtttgttgcagaaaatgatgcattgacagaaaatctgaagaaatataagcattatgtttttttcggtaatgataaagtctttaaaaatggtaaaggtcatgaaatggaaggctttctgaccgaagaagaacaaaaagctataaaaaaagaacttaaaaaactacaaggttatgcagaagaaaataataagtcatttgtaaagaattcaaataatgctatctctaaattagctagtatagaattacttagagcaaatatgatgactacaaatggaggaggattatcttcttcgcagcaaaaagttttagaaagtttaacagctttaacaattgcgcagtcattcagtcaactgatagacgatgaaattaatcaaatcaaaaaaatgtataatgaaaagaaaaagaaatttggaaaaaattgggaagacgctcaaaaagctggaaaagctgtaggtgaagatttgagtgtaaatggagttctcaatgctttagatgaaggtcaagtgaatgaaagtagtatggtaagagaacctgaacaaatgatatctgcaaaagaaagacaactttcaacgatagggtcttctgtatcaaattatattatgagagttagactcagtattaatgaaatcgttgataaagatcaagtgcttgcatcacaaataggtggattactatgatgtttaatcaaattaataataaaaatgaattagaagaatcatatgaatctgagaaaaaacgtatagagaatgaactgcaaaatttaaatgaacttaggcatagaactcgaaaagaaaatgaacgtagttatgatgtttttcaatatttgaagcacgaaatgaattatagtgaagatgcccaaaggaaaatgacgagaaatatagaagcgtatgagcaagaaatcaatgagataattagaaagcaagaatggaaattagaagaatataaagaagacttaaaaaagtcttatgaaaagcagttagataagctaagtgactgataatttggaggagattaaatgactctaatagaaccagatatgaccttaagaatgccagatataagtactacagtagaaacacttaatctcatatctaaaatggaagcgcaaaaagaaaatattcgcacagttattgcacctgaacataagcataaatacaaagatattgaaaacggattaaaaggtgaagaaaaagtattaattgaacaaatggcgcaacattgcgaagcttttaaagctaattttaaaggtgcagctcaaggagattgggttaaaagtgccatgtctgagatagacagcattaaggatgacctgaaaaaaattaatagctaaactacatatcatactactaaataaagcgaccaatgttcagtatattcacaactgacactaggccgcttctttttaatttatattattcccatgtaaagtaattcgaaccgaatcgaaatatcacactctcaattgtaaaaaaacaacttaaattactgtcccgcattaaacatgaccacattcgtaacagcaacaataaaaatcctcaagtactaaaagctatgatcactttatcaaaatcaacgcaagttaacctctcccgaactacccgttactcatcaccttcaccttacaaaccataaagcgctgcagttaagtattgaatggcatagccaattgaaatgaaaatagcaatcgttataatagcactgccaatggtatataaagtatgtttcgtagataatccttcagtctttgaaccaaaaacactgagtagaataaatgcaataccagtaacatataaaactaaaatgacaaataacatgtttatacacctcgattctctttcgtgagatatatctttgtctccattataaagtaaagcgctcaataatttaattaagtatactatttttttattatcgaagattgcgaaagaggaaacgctcctatataatgtaaaacagaattattcctatttacaaataaattgaagtgagggtatatatatggctaaaattccagttacggtattaagtggttatttaggctcggggaagacaacgttgttaaatcatattttacaaaatcgagaaggtcgacgtatcgcggtaattgtaaatgatatgagtgaagtaaatatcgataaagatcttgtcgcagatggtgggggactatcgcgtacagatgaaaaattagtcgaactttctaatggttgtatctgttgtacacttagagacgatttattaaaagaagttgagcgtttagtgaaaaaaggtggcatcgatcaaattgttattgagtcaacagggatttcagagccagtacctgttgcacaaactttctcatatattgatgatgaacttggcattgatcttacagcgatttgccgtttagatacaatggttacagttgtggatgctaaccgcttcgtacatgacatcaactcagaagatttattgatggatcgtgatcaaagcgttgacgaaacagatgagcgttcgattgctgatttattaattgaccaagttgaattttgtgatgtattgattattaataaaattgatttaattagtgaagaagaactagcgaagttagaaaaaatgttaagcgcattgcaaccgactgctaaaattattaagacaacaaattctgaagtagatttaaaagaagtcttgaatacgcagcgttttgattttgaaaaagcgagcgagtcagcaggatggatcaaagaacttgagtctggtgggcatgcatcgcatacacctgaaacagaagaatatggtatatcatcgtttgtatataaacgtcgtctacctttccatgctaaaaggttcaatgattggttagaaagcatgccaaataatgtcgttcgatcaaaaggtatcgtatggctagcacaatacaatcacgtagcatgtttattatctcaagcagggtcatcttgcaatattcatccagttacatattgggtggctagtatgtctgaagcgcaacaaacacaaatattagcagaacgtcaagatgtcgcagctgaatgggatccagaatatggcgatcgtcatacacaatttgtcattattggtacagaattagatgaagaaaaattaacaaaagaactcgacgcatgcttagtcaatgcgcaagaaattgatgcagattggcaacaatttgaagatccatatcaatggcaaattagaccagcacgataagttgaatgaagtataatcatttttgaattgtggcttaattgtttgcaatttatgacaattaataaaaagttaaggtgttcttaggatctttttgttttcaatctatctaaagtgtgatagttttgataaagcagaaatttgcattttatccatagggctaggacatgtatgtgtcttagtcctttttatatttacgttgatgaaaaatggcaaaaccatcgtaccaactgttaattgaaggtacaatcattgtttaacagtcataaaaatgagtgaagtaaatgcagctatcaatgtactattaacacttacggtcacacgagtgtttcagtctaaacgtgcaacgcaattccgcacgtggccaatatatcttgcgctagatcatgaaaatcattaagatttcgcatgccaaatcatgaatgtctcagaactcgagtatcaaacataaaacacgccacaaaaatataacgcgtcagactacaaagatcacgaatattccgtatgtcccactaagaacgtcctatacaaaaaacaccaagaccatttatttgcaacaaactaacaagactcacctcacatcaataaatcaacacaaagcaaagccaccatccctattggtatagtggcctgagaattttaagtattcaattcgcttaaattattttgcgaaaatgtcgataattgctttgatgattttaatgatagtacctacaatagccatcgttttgtcctcctgtatgttgatttaacatagtgatgagttgttgatcgttaatgtttgagattagttgttacctaaaaatttaccaagtaaatctttaaagaatttgaataattttgctacgaattccatgtgaatggcccccttcaaataagatgttcatatctatgagatttttataacttacttaccagtgaatttctcaattaatcctttaatgaatttaatgattcctgcaatgatacccatgtgaaagacctcctttgtttgttatgaaatcttatttaccagtgaattgttcgattaagcttttgataactttaatgatgccagcgatgatacccattaagattacctcctttgcttatgagttaacttcattgtacatagttatcttgtgcgtaattgatttttttcctaacttgaattgttatgatcataactgcgaattttttattttaaaaggacgggaaatactgcctaactgtacaggtgcatttacaaaatctttacaatcattggtttaatagaggttaagctcatgaatttgacatgaagcagaaatttaattatattttatgttataagtttaaaacgaataacacgttaggtctcgtctaggcaaagcatatttatgaagatgaattgaacagacagaagtaacattttatatacatatgtgcatgggagcacgcttaaagagaacactgcaacaaggtatatcaacgtaccgtgatgcagtgtctagttaaactgaaacctgcaatagtaaattttctgccattatgtacagaatctactattgtaggtttttatttttatacataagcaattatgcgagagattagaaataaggaggttatgcagtgttaagttttcaattgctattttcactgtttgttattgcgcttatcattgcattgataagtggcttgttgtttttagcaccagttatgccaatgagatatattaaattacatttatacatactagtcatgccagtattatttgcagtcattggctttttcggtattcatggtcaacatgtcttaggtccatttaaaatagatcgtttatcttggttattagctggctttgtaatggcgcttggctttattattcaaaagttttcaatgcgatatttactaggtgatcatcattatagacattactttccattgttcactgcgattacgtcgtttgcatctttagcatggatgtctgaagacttaagactgatggcactctgctggggtattacattattatgtttaacattgctgatgaacgttaatcgtttttggaaagtgccacgtgagtctgcgaaattatcaagcatgacatttttatgtggttggcttgcattcgttggagcaattgtaactatttatattgcgactggcgagtggcgggtaccacaacatatagttcatccgacatggtcattgttgacgaatgtactacttgtattagctgtcatgataccggcagcacaatttccttttcatcgatggttgattgaatctgtaacggcaccaacgccagtatcggcaattatgcatgcaggaattgtgaatgcaggtggtgttattctaactcgttttgcgccgatatttgataatggatttgcgttatcattattacttatcctttctagtatttctgtattgttaggatcgggtattagcttagttcaagttgactataaacgccaattagtgggctctacgatgagtcaaatgggctttatgttagttcaatgtgcattgggtgtatattcagcagcgattattcatttaatattgcacggtatttttaaagcaacattatttttacaatcaggttctatcgtgaagcgattcaatattccaaaacaagcatctgctaaagacgcttatggctggattgtcatgggacgtgtattagctattatcgtggcatttctattttggatgagtagtgacagaagtgcatatgaagtgttaagtgcactcattctaggatggtcattacttgtatcttggaatcaaatggtagcctttagtaaaggacgcatggcacgtcttgttggtatgattttgattgcaatcgtgacatttatctacgtcatcacacataattatttttacgctgtattacaaaatataacaacacatgcgacaacgccgcctacagtgagtgtcatcattagtgttgttattttaatctttggcagtttattaagtatttgggtggcgcggcatcgatactctaaggcttttgcggtattgtacgtgtggttagttaatctaggtgaagcacgctcgaaagcgatagaaagtcatccgaattatttgaagaagtatttataggaggtgaaaggtatgacaacacagttaaatatcaattcagtcattgaaaatgcgaaacgtgttattacaccattatcaccaatttcgatttttgcagcacgaaatccatgggaaggattagaagcggatacgtttgaagatgtcgcaaaatggttacgtgatgttcgagatgtggatattttcccaaataaagcattaatagaaagcgctgtggcacgtggtgaattagatgaaagtgtctttaatcaacttgttactgatatgttacttgaacatcactacaatatcccgcaacactacatcaatctttatattgataacattaaaacattaaaagacgtacctgcatcatatatgaatcattcaaatgttgatgttgttgctgatctactattagaaaaatcaaaacgtgatatggctgaatcatatcatcactatgatgtacgtccgatgagtgatgcaataatagatgaacaaggtgagccacttagcgaacaagtgaatcgtcaaatgattaaatggacgaaactttatatcgatcaatttctatcgagttggacaatgccgaagcgtgagcaaagtttttaccatgcatggttgcatttagcgcaacatgaccatagttttactaaagcacagcgccaagtgattaaaggcttacccaatgatcctgaaatgacgatagagtcagtattaactcatttttcaatagatcaggaagactaccaagcttatgttgaaggacatcttttggcgttaccgggttgggcaggtatgttgtattaccgttcacaacagcatcactttgaacaacatttgttaacggattatttggcaattcggttagttgtcgaacaattgctagttggtgatgagtttaagtcagtcgctaaagattgtgaaagtagatcggaaaattggtttaagcaaactgttgcatcatggtgttactacagtgatatgcctagcgatgtattactacaacatgacgtcaatgaaattcaaacgtttattcattttgcagcaactatgaataaaaatgtatttaaaaatttatggctaattgcctgggaaatgacatacgaatctcagttaaaacaaaaaattaaagcaggtcatgaaagtgtggcgggcgcattagatgtaaaccaagtaaatgtctcagaaaatgataacgctaatcagccacattcagtattgttaaatgacacacaagcagttgatgaaaataatagcgagctaaatcagatgggcacatcaacgaaagcgcaaattgcattttgtatagatgttcgttcagaaccatttcgtagacatatcgaagcagcagggccctttgaaacgattggtattgcaggcttctttggattacctattcaaaaagatgccgtagacgaacaattcaaacatgattcattacctgtcatggtaccgccggcatatcgcattaaagaatttgcagaccgctacgatatgaatgtttatcgacaacagcaacagacaatgtcatcgatgttttacacatttaaattgatgaaaaataatgtcatgcctagtctgttattgcctgaattaagtgggccatttttaagcttaagtaccattgtcaattcgattatgcctagaaaaagtcgcgcgtctttacaaaaaataaaacaaaagtggttgaaaaagcctgaaacaaagttgacgattgatcgtgagtttgaccgaacatcagacttacctgttggatttactgagcaagagcaaattgatttcgcgttacaagcgttgaaattgatggatttaaccgaagcatttgcgccgttcgttgtgttagcaggtcatgctagtcattctcacaataatccacatcatgcatcacttgaatgtggggcttgtggtggcgcatcaagcggttttaatgctaagttattagcgatgatatgtaatcgtccaaatgtcagacaaggattaaaacaatcaggtgtgtatattccagagacaactgtttttgcggtagcagaacatcatacgtctactgatacgttggcatgggtatatgtgccagacacattatcttctattgctttagatgcatatgaatcattgaatgacgcgatgccgatgatttctgaacacgcgaatcgcgaacgtttggacaaactgccaacgattggtcgtgtgaatcatccagtggaagaagcgcagcggtttgcgagtgattggagtgaggtacgtccagaatggggattggctaaaaatgcatcatttataattggacgacgccaattaacaaaaggcattgatttagaagggcggacatttttacacaattatgattggcgtaaagataaagatggcacattattaaataccatcatttctggtccggcacttgtggcacaatggattaatttacaatattatgcgtcgacagttgcgccgcatttttacggaagtgggaataaagcgacacaaaccgtcacgtcaggtgttggtgtcatgcaaggtaatgcgagtgatctgatgtatggcttatcatggcaatctgttatggctgctgatcggacgatgtatcattcgccaattcgtttacttgtcgttattcaggcacccgactatgttgtagcaagactactcgcgaataatgagcatttcgctaggaaggtgtctaatcattggctgcgtttaatgagcgttaatgaggaagggcgttttaaaagttggatttaacgatgatatgttgcgatgctaagtaactaatatatcatcatatctacaatgttctagcttcttaaaatatactaaaaatgataaacttaatgtaatagttgatgtcgtgataacgatacaaagatgaagtaatcaattttaatattattggagttagtgatatgaaaagaacgaaaggtgaaatcgaagctgaaatcagtaaagccattacgcaatgggaaaaagatttccttggcagaggttccttgtcagttaaatcagacattttaagagatatggtgattattagtttacaaggtatcttaacgccagctgaatatcgtgtatgtagtacgaatgaaggattattaaatattaaacgaacacgttctgaattagttgaatccggtgagcaagatttgaatgatatcatttttaaaattacaggtatcaaagtgatgagcttccatagtgatttaagtacagttacaggtgaacgtattatcgtattcaaacttgaggataatttggaaaagcatatttaagaaggttaggtatgcttctgctggcttattaaagctatagaagtatgcttggttaaacagcgcaacgccatatatttgggtgtgctgtttttctattacatgatgtgtttattacgtggatgaatgcgtgggtctgaatatagcccgtgaaaggcgtatgtcataaaatttgcgaatggtgacaagtcgacgcaagcatatttgttgcgagacatgcccactatccttttacataaagagtatatgtgtgacgtaggcatataatcgataaagtattcctaaaaaattaggtataatgaccattgttgcaataagtttttcggccttgaaaccgataacgcatagtataataggaataaaatataatacaaatatccagtaaatcaaatttgaaaatgatggatgaataggggtaaagaatctaactaatgtaatgattaacgctatatagacaaaaataactctattgatacgccttaccccctctgtataataaatataaatcgtactaaattgaaaatagcaaaatattgttatttcaattatacaatgttttatttgcaatatacataacaatatgaactttataattttgatattgtcggtaaagtgaaatttgtggcacattgatattatggataacatttgtaaaatgaaaatgatgatacgaggagattgtaagatgatagataaaaaattaacatcaccgaaaatgacagtgcctttatttttaatcgcgctgattgtatttataggtatgttttacagtgtagtgacaaatcaagaatggcttaaaaatatagatatgggatcattaacatggtttacagattatttcggtgagccacaacgtcagtatgttaacaatttgtttaattactatatgacgtttagtgcggaaattggagatgtcaaaggtgtcgtgttgatttccattatcgtcacaatcatactgtttattaaacagaggcatttagcggtttggtttgtgacatatttggtttcaggtgtcatcatgaacaaattaattaaagatactgtattacgtccaagaccatataatcatttagccgttgatacaggcttttcatttccgagtggacattccaacgccagcacattattatatttcgccttaatgatcattattatttcacttgctgctaagacaataacaaaagtgttgagtgcgttggttatgggaatattatggcttagcatattattttgtcgcctttattttcatgcacattacttttcagatgtcattggcggcacgtcactagcaatcatttgggtagcgttattcttaatggtatacccatactttattaatcatcgacgacaacgcgtttagcaaacatctttagacatagtggaggtatatagaaaaatgagaattaaaacaccgagtccatcgtatttaaaaggcacaaatggacatgcgatattattattacattcatttacaggtacaaatcgggatgtgaagcatcttgcagctgagttaaatgaccaaggatttagttgttatgcaccgaattatccaggtcatggtttattgttgaaagatttcatgacatataatgtagatgattggtgggaagaagttgagaaagcttaccaatttttagtcaatgaaggttatgaatctatcagtgcaacgggtgtgtctttaggtggattaatgacattaaaattggcgcaacactatcctttgaaacgtatcgctgtcatgtcagcaccaaaggaaaagagtgacgatggcttaatagaacatttagtttattatagtcaacgcatgtcgaatattttaaatttagatcagcaagcatcgagtgcgcaattagcagcaattgatgattatgaaggtgaaattacgaagtttcaacattttattgatgatatcatgacaaatttaaatgttattaaaatgccagctaatatattatttggtggtaaagatgcgccatcctatgaaacaagtgcacattttatttatgaacatttaggatcagtagacaaagaattaaatggtctgaaggattcgcatcatttaatgacgcatggagaaggcagagatattttagaagaaaatgttattcgctttttcaatgctttaacataattgaagattttaaaaattaacacttgagtgacgatgttattatatttgtcatttgagtgttttttgtggcgtgatagtatagggaacttagctaaagttaatttgtagtgtgatgtcgtggaaatattatggagttataccagaagttgatttgtattgtaatgtcgtggaaattttatgggcattgcacctgaagttgttatgtggcgagatgttggggatatagatggtgttgtatgtggcgagatattggcgcacgtatacagcgttgaaccagaaaatttaatgtagcgtaatgacaacacattacaagagttgattatattatgataaatccaggtgctaccgtattaatgaaacaattttgatgcaggtgtattgcatgttatttacatacatgttagagtgttacttaaacacgtagacgctttaacgctttaaaggagatgtgaatgatgaaaagacaacaatcacaatggaagtcatcaactggatttattttagctagtgcgggttctgcaatcggtcttggtgccatgtggaaattcccatatatggcagggatttatggcggcggtgcctttctagctatgttcttaatattcaccatttttgttgggttgccattactcattatggaattcactgttgggaaaatgggacggacatatacaacacaaatatatagtaaattaactggtaaaaaatggctcaatatcattggctggaacggtaatttggcagtgtttattttatttggcttctatagtgttatcggtggttggattgtcatttacatcggacaagtattatggcaattagttatatttcaacgcatcaatcatctccaagaaatgaattttgaagcggtaatatcaaatccttggttaaccgttctagggcaaggtatattcatattcgctacgatgattattgtcatgttaggtgttgaaaaaggattagaaaaggcatcgaaagttatgatgccattgctgtttgtctttttaatcgtcattgtgattaagtctttaacattagatggcgtcttagaaggtgtgaaatttattttacaaccaagagtatcagagattactgctgatggcatcttgtttgcgctaggtcaatcattctttacgttatcattaggaactacaggtatgattacttatgcgagttatgcctctaaagacatgacgattaagtcatcagctatttctatcgttgttatgaatatctttgtatctgtattggcaggtctagctatatttccggctttacatagttttggctatgaaccacaagaagggcctggattattatttaaagtactgccaatggtctttagtcaaatgcatctaggcacattattctatttgggattcttagtgctgttcttatttgcggctttaacgtcatctatttctttattagaattaaatgtttctaacttcacgaagaatgacaatacaaaacgtaaaaaagtcgcagtgatcggtagtattttagtatttatcattagtattccagcaaccttatcttttggtatcttaaaagatgtaagattcggtgcgggaacgatttttgataatatggatttcatcgtttcgaatgtattgatgccattaggcgcattaggtactacgcttgtcgtaggacaattattagataaaaaattattacaacaatattttggtaaagatcgatttagattattcagtggttggtattacttaattaagtatgcgatgcctgtcgttattattttagtctttatcgtgcaattatttagttaatatatagaagcatctgacacacaagtatttgtgttgctcaggtgtttttttgtttggaattgaaaatttagtactggttctgaattaatcgaaacttagataattgcaaaataacaaaatgtcgtttataattcttatctgaaaagtaagaattaaaattgagacatgaagaaaggtttcattcatttgatcggcatgtcagatgagggtgcatctatgattacttatgatttaattggcaatacaccattagtactgttagaacattatagtgatgataaagttaaaatttatgccaagcttgaacaatggaatcctggaggcagtgttaaagacagactcgggaaatatttagtagagaaggcaattcaagaagggcgtgtgcgtgcaggtcaaactattgttgaagcgactgctggtaatacaggcatagggttagctattgcagcgaatagacatcatttgaaatgtaagatctttgcgccgtatggtttttcagaagaaaagattaatattatgatagcgcttggtgcagaagtttcaaggacgagtcagtctgaaggtatgcatggggcacaattagctgcacgttcctatgctgaaaaatatggtgccgtttatatgaatcaatttgaatccgaacataatccggatacatattttcatacattgggacccgaattgacttcagcattacagcaaattgattattttgtggctggtattggctctggcggtacatttacaggtaccgcacgttatttaaagcaacatcacgtgcaatgttatgccgttgagccagaagggtccgtgttaaatggagggccagctcatgcacatgacactgaaggtatcggttctgagaaatggccgatatttttagagagacgtcttgtagatgggatatttacgattaaagatcaagatgcctttcgaaatgtcaaaagtttggctataaatgaagggttgttagtaggcagttcttcaggtgcagcattacaaggtgcattgaatttaaaagcgcaattatctgaaggtacgattgttgtcgtatttccagatggtagtgatcgatatatgtctaagcaaatatttaattatgaggagaataataatgaacaagaaaactaaattaattcatggtgggcacacaacagacgattatacaggtgccgttacaacaccaatttatcaaacaagtacatatttacaagatgatattggtgatttacgtcaaggatatgaatattctcgtactgcgaatccaacaagaagttctgtagaaagcgttattgcgacattagaaaatggcaaacatggctttgcatttagttcaggtgttgcagcaatcagtgcagttgttatgctgttggacaaaggagatcatattattttaaattcagatgtatacggcggtacttatcgcgcattgacaaaagtatttacacgatttggcattgaagtggattttgtagatacaacgcatacagattcaattgtacaagcgatacgcccaacaacaaagatgttgtttattgaaacaccttctaatccattattacgtgttactgacattaaaaagtctgctgaaattgcgaaagaacacggtttgatttcagttgttgataacacatttatgacaccttattatcagaatccattagatttaggtatcgatattgtcttacattctgcaacgaaatatttaggtggacatagtgatgtcgttgctggtttagttgcaacatcggatgacaagcttgcagaacgtttagcatttatttcaaattcaacaggtggcattttaggacctcaagatagctatttacttgtgaggggtattaaaacattaggtttacgtatggaacaaattaatcgcagcgttattgaaattattaaaatgttacaagcacatccagctgtgcaacaagtgttccatccaagtattgaaagtcatttaaatcatgatgtccatatggctcaagcggatggccatacaggtgtgattgcatttgaagtgaaaaatacagaaagtgccaaacaattgattaaagcaacatcgtattacacattagctgaaagtttaggtgcagtggaaagtttaatttcagtacctgcattgatgacacatgcatccattccagcagatattcgagctaaagaaggtattacagacggacttgtaagaatttctgtaggtattgaagatactgaagatttagtcgatgatttaaaacaagcactagatactttataaataatagcagcactggcatatattttgagttcaacgtttgttgttcttgaatatgctagtgcttttttgtgcgatgttaatatttagtaattgcgttgtggaggattggtggacatttttatggatttaatttgataaatgtcatagtagtctcacaattcgtcattgtcacatgaattacttattttttaattttttagaaaattcggcaaattgtattgacgatatatgcaattttacatataatgctcttattcctagtggattaataagaatttgtaggaggggcgatgatgattgagtttcgacaggtaagtaagacctttaataaaaagaagcaaaaaatagatgctttgaaggacgtatcatttacggtcaatcgcaatgatatttttggtgtgattggatatagtggtgcaggaaaaagtacgttggtaagactcgtgaatcatcttgaagctgcctcgaatggacaagtgattgtagatggacatgatattacgaattatagcgataaaatgatgagggatattaagaaagatatcggtatgatatttcagcatttcaatttattaaattcagctaccgtatttaaaaatgtagcaatgccactcattttaagtaagaaaagcaaaacagaaattaagcaacgagtaacggaaatgcttgaatttgtaggattgagtgataaaaaagaccaatttcctgatgaattatctggtgggcagaagcaaagggtggctattgcaagagcgcttgttactaatccgaaaatactcctatgcgatgaagcaacaagcgcattggatccagcaacgactgcttcgatattgacgttattaaagaatgtcaatcaaacctttggcattacaattatgatgattacacatgaaatgcgcgttattaaagacatttgtaatcgtgttgctgtaatggaaaaggggaaagtggttgaaacaggaactgttaaagaggtgtttagtcatcctaaaacgacgattgctcaaaattttgtgtctacagttatacagactgagccaagtacatcattgattcgtcgattgaatgacgaacaagttggcgattttaaagattataaaatcttcgtcgaggaaactcaggtgacacaaccgattataaatgacttgattcaaatttgtggcagagaggttaaaattttattttcatctatgtcagaaatacaaggtaacaccgtatgttatatgtggcttcgatttaatatggatcaacaatttgaagacacggcaataaatcaatatttcaaagagaaaaatattcaatttgaggaggtgcattaacatatgtttggttctgatttagacagtgcacagttattacaagcattgtacgaaacgctatatatggtatctattgctttatttttaggagcagtgattggtattccattaggtgtcttattggtaattactcgaaaacaaggcatatggcccaatatagtgatacatcaagttttaaatcctttaatcaatattttaaggtcactaccatttattattttgttaattgcgattgtgccattcacaaaattagtagtaggtacttcaattggtacgactgctgccatcgtgcctttaacagtatatgtggcaccttacattgcaagacttgttgaaaactcattattggaagtagacgaggggattattgaagcggcgaaagcgatgggcgcttcaccactacaaatcattagatattttttaattcctgaagctttaggttcgttagtattagcaattaccactgcgattattggacttattggaagtacggcgatggcaggagctgttggcggtggtggtataggagacttagctttagtgtatggttatcaaagatttgatacgacggtcattattattaccgttattgtattagtcattattgtccaagtgattcaaacgctagggaatgttctagctagattcatacgtagacattaatgatatatagtgaagattttgaaaggaattgatagaatgaaaagattgattgggttagttatcgtagcacttgtattattagcagcgtgtggtggtaacaatgataaaaaagtaacaattggtgtcgcatcaaatgacactaaggcttgggagaaggttaaagaattagctaaaaaagatgatattgatgtggagattaagcacttctcagattacaatttaccgaataaagcattaaatgatggtgatattgatatgaatgcattccaacattttgcatttttagatcaatataaaaaggcgcataaaggaacaaagatttcagcattaagtacaacagttttagcaccgttgggcatttactcagataaaattaaagatgtcaaaaaggttaaagatggtgctaaagttgtcattccaaatgatgtgtcaaaccaagcacgtgcacttaaactattagaagcagctggtttaataaaactgaaaaaagatttcggattagcaggcacggtgaaagatataacgtcaaatccaaaacatttaaaaattactgcagtagatgcacaacaaactgcacgtgctttatctgatgtcgatattgcagttattaataacggtgtagcaactaaagcgggtaaagatcctaaaaatgatccgatatttttagaaaaatcaaattcagatgcagtaaagccatatattaatattgttgcagttaatgacaaagacttggataacaaaacatatgctaaaatcgtagaattgtatcattcaaaagaagctcaaaaagcgttgcaggaagatgtcaaagatggagagaaacctgttaatttatctaaagatgagattaaggcaatagaaacgtcattagcaaaataaattatattgcgtcctacaagcaaagttcatgcttatgtttgtagggcgttattgttggagaataaaattatttccaatagagaaagggattgtaatcattttatagtgaaatattatgaaattgtaataatttagatattgtaaaatctaataagttgtaataattttaagggataattataaaatttgatgatacagtatatgatttttttgtaatcataatgtcatcaaacatcaacctattatacataataaaatcgtataatgatgtagtattcataaattcggataaaagaatgttaggaaagttaagcaagaggaggattttaaagtgcaaaaaaaagtaattgcagctattattgggacaagcgcgattagcgctgttgcggcaactcaagcaaatgcggctacaactcacacagtaaaaccgggtgaatcagtgtgggcaatttcaaataagtatgggatttcgattgctaaattaaagtcattaaacaatttaacatctaatctaattttcccaaaccaagtactaaaagtatctggctcaagtaattctacgagtaatagtagccgtccatcaacgaactcaggtggcggatcatactacacagtacaagcaggcgactcattatcattaatcgcatcaaaatatggtacaacttaccaaaacattatgcgacttaatggtttaaataatttctttatttatccaggtcaaaaattaaaagtatcaggtactgctagctcaagtaacgctgcgagcaatagtagccgtccatcaacgaactcaggtggcggatcatactatacagtacaagcaggtgactcattgtcattaattgcatcaaaatatggtacaacttatcaaaaaattatgagcttaaatggcttaaataatttctttatatatccgggtcaaaaattgaaagtaactggtaatgcatctacgaactcaggatctgcaacaacgacaaatagaggttacaatacaccagtattcagtcaccaaaacttatatacatggggtcaatgtacatatcatgtatttaatcgtcgtgctgaaattggtaaaggtattagtacttattggtggaatgctaataactgggataacgcagcggcagcagatggttacactatcgacaatagacctactgtaggttctatcgctcaaacagatgtaggttactatggtcatgttatgtttgtagaacgtgtaaataacgatggtagtattttagtttcagaaatgaactattcagctgcaccaggtattttaacttacagaacggtaccagcttaccaagtaaataattatagatatattcactaaagtcttacgtatataaatatataatgaattcctattacatttcacaagctgaaaagttggattgaatcctaaattttatggcggggctatcaaagtcgtgattgttgtaataggaatttttgtatatgaaaaaggattggtcgaatgaacttcatgttctatgttcgaccaatccttttctgaattagtattcatgttttactttgcgaatgcttgtaaataatctagcaccgtttgttattaaagtaacaactgccactgcttttttgaacttacgtggtgacttaattgaaatgtaaaagtctaacacggttcctacagtgcttaaacctaatgaaagatatactaattttttatttttagcatgatatttatagccattgtagccgtcgactatgaaacctgcgacatttagtaaacttgataaacgttgtgatttggaacgttttgccataataataattccccctagtatcttctgtttatatgaaaagttgggtgcgctgaattgctaacgttttgcgctataactactcatatatgataacataattgtacagtataatttgaaaaattgatttcacaaagttggggtgtcaaagatgattaaatgtgtctgtttagttgaagaaacagctgataaaatattgcttgttcaagtaaggaatcgcgaaaagtattatttcccgggtggtaaaatagaagaaggggaatcacaagtacacgcgctgttaagagaagtaaaagaagaattaaatttaacattaacaatggatgaaattgaatatgtcgggacaattgtaggtcctgcatatccacaacaggatatgttaactgagttaaatggatttcgcgcattaaccaaaatcgattgggaaaacgtaactatcaataatgaaattacggatatacgctggattgataaagataatgatgcgttgattgcgcctgctgtcaaagtttggattgaaacttatggtggtaaacatgacaaataatgacaccatcatgttacgacattatgtcccacaagattattcgatgttagaagcttttcaattaagtgaaagtgatttgaagtttgttaaaacgccagaggaaaatattacagctgcaatgtctgataatgaaaggtatcccatcgttgtaatggatggcaggcaatgtgtggccttttttacattacatcgtggaaaaggggtcgcaccatttagcgataaccaagatgcagtatttttcaggtcatttagtgttgatcaacgttatcgtaatagaggaataggtaaagtggtaatggaaaaattggcgtcatttatcacttcaacatttcaggatattaatgagattgtgttaacggttaatactgacaatccacatgccatggcactttatcgccaacaaggatatcaatatatgggagatagtatgttcgtcggaagacctgttcatattatggcgttaactataaaataaattaaatttaaaagcatctttactcatcgtcgaccacaacaattaatgatgaataaaggtgctttttgttatagatcatcggacaatttactatagtaaaaagcgacctagtgaacaattgacatatatccacaggtcgcttaacttaagttatattgctagttgcgattaattgatagactcatcatttttgcgctgtcgagatggtctttttattaaaaatgccgtaatccaagccgtaatcggaatactgattgcaacggcaataccgcctaaaataatagaaataaattcttgggcaaatattttcgagtttataatatgaccaaatgaatatttaagtttgaaaaaccaaataaataaagcaagttggccaccaaaaaaggcaaggtaaatcgtgttcgcagatgtcgctaaaatttctctaccaacacgcatgccagattggaataattcgtattgcgtaagcgttggattcacttgatgcaattcataaatgggtgaactaatggtaattgttaaatctatcacagctgcaataacagcaagaataatagtgaacaccataaattgaaccatatcaatgccaatattcattgaatacacatatgtttcatcttgttgttcggttgaaaagccttgtagatgaccgaagtagaccgataaataaatgagtgtaatcaacaatattgttgtaacgatagtgctgataaatgcagcttgtgttttaacattgtaactattgagtacgaataaattacaagcgccaataataatgcagaaaaagaatgtgacgacataaatcggtacgccaaaaataatcaatacaatactaataattaaaatagcgaaatttaaaaatagggttaaataagagatgaatccctttttacctccgaaaattatcatcagaaagaggagcaataacgccaatataaatacagcattcattgtttcgccctccttaatgtttcaaatatttccataaacaatattgtgataggaattgtaagtacgatacctataccacctgttagtgcgcgcgcaatttctaacgaccaattcatcgaaatagtataagtcactgtattggcattttttaaaaagattaaaaacataggtagtgcaccggataaatatgagaataataagatgttagtcattgttcccataatatcttggccgatgtttcgcccagcaagcgcccatctcctcattgaaatgtgtggcgtacgctgtaaaatttcatgcataccactagcaattgtaattgcaacatccataatagcgccaagtgaacctattaacactgaggctaggaagatatctttcggtggtaatgataaaaagttcatcgtttcatatttaatgcctttaccatctgtcatatatatgattaattctgttaaacctatactcaaaaaagttccgataattgtactggctatggtaatgagtgtacgcatatgccagcctgtaacgagcaataaagtgagtattgttgaacagatcatggcaatggtcatgagtaagaataaattaatattgctatgttgaatatgaatgtaaattgcgattaatatggcaatagaattcaagattaacgataaaatcgattgcagtccgactttgcgaccaaccaataatacagttaataagaacaaaccagtgatgataaccgttaaggtatcacgcttcttttctataatataagcatcactcggcttgttagaaatatgtaataatactttttcgtgtgtgcgaaatgcctcagaatctgcttgcgatttgacgtactgatgattaatcgtcgtcgtttctccagcaaattgaccatttaatattttgacttttaattgatttttatatttaatatcacgattattttgtgcatcttttgtaggtgtcgaagaaacatgtttgacatctataatttgaccaattggtttgttgtaaaagttctcattattgaatgtaaataaaatagcaccaatgaatgcgatgcagaacaaacctaaaattatattaaatggctttgtaaataaatttctatatttcaaaaacaaaaccccaattctatgaatgaattaatatggtgattatacgcccttaattttttattttcaaagatattactgctaagtgtaaaacgaaaatcatcattgatagcatcgaattacttaatggaatgtagacgttttagtcattaattgctgaataagtgttaataatatgccaatatcactctttgtataaggctcctttgtaatagcacatatcgttctttttaattcagtatgatctaattttatatctatccatgatttagattctggtaaatgtatattttgtgatgaaatgatgtaaccttctttttgacgaaggagatactgcgcaagtggttggctactgattgtgtatacatctgatttagtaatcttgcgcaattgtttttttacagtttcggcaaatggtgccaagcaataaatatgactatgctcaaactgaattaatggtgggtgtgtcgccatcgtaattggatcgtctgaaggcgcatataaatgatagtgctcttcgaataaaggtagcatatgtaattgtttgtgtttacgtatttctggtgtaagttccgtgaaaccaatgtctatattcccatttaatacgctatttataattgtgtcatgttctaataagctcggtatgacatgtgtatcattttgtaaatgaaacgtttggataagtggtagtaacatgtgggatacgtcactctcatcatagccaatgtagatacttttatttttagttaatccatggctttgaaattgttcaatcgtgctatctaaatgttcaataatacgcagagcttcattaaataataatttcccttcagatgtgagcgtaatattgcgtccttgctttttaaataaagacacattaagttcttgttctaataatgtaatttgacggcttatcgctgattgagcaatgtttagttcaagtgctgtttcggagatatgttctcttttagcgacctcgataaaatatcttaattgtttaatttccatagcgatataggcacctccaaaaatgagtgttttgtaactattatagcaatattattgataaatgttctattttttagatgaatatcttctattttatatattgaacagataaattttttagattatagtaattatcattaataactaatatcagaatattctaaaaaaggggtgtgcatcatgcacaatgagaaattaattaaaggcttatatgactatcgtgaggaacatgatgcgtgtggtattggtttttatgcgaatatggataataaaaggtctcacgacatcattgataaatcgcttgaaatgttgcgacgcttagatcacaggggcggggtcggcgcagatggcatcactggtgatggcgcaggtattatgactgaaataccttttgcatttttcaaacaacatgtaacggactttgatatcccaggtgaaggtgaatatgccgtggggttatttttttccaaagaacgcattttaggttctgaacatgaagtagtttttaaaaaatattttgaaggcgaagggttatcaattcttggttatcgtaatgtaccagttaataaagatgccattgctaaacatgtagcagatacgatgccagtcattcaacaagtgtttattgatattagggacattgaagatgttgaaaagcgtttgtttttagcgagaaaacaattagagttctattcgactcagtgcgatttagaattgtattttacgagcttatcacgcaaaacaattgtatataaaggttggttacgatcagaccaaattaaaaaactatatacagatttatcggatgatttatatcaatcaaagctagggttagtgcattcgagatttagtacgaatacattcccgagttggaaaagggcacatcctaaccgtatgttaatgcataatggtgagattaacacgattaaaggtaatgtaaactggatgcgagcacgccaacataaattaatcgaaacattatttggcgaggatcaacataaagtgtttcaaattgtcgatgaggatggtagtgactctgccattgtagataatgcgctagagttcttatcgttagccatggagccagaaaaggcagcgatgttactcatacctgaaccttggttatataatgaagcgaatgatgcaaatgtacgtgcgttttatgaattttatagttatttaatggaaccgtgggatggtcctacaatgatttcgttctgtaacggtgacaaacttggcgcgcttacagatagaaatggattacgtccaggtcgttatacgattactaaagataactttattgtcttttcatctgaagtgggtgttgtggacgtacctgaaagtaatgttgcttttaaaggtcaattgaatcctggaaagttattgcttgttgattttaaacagaataaagtcattgaaaataatgatttaaaaggtgcgattgctggagaattaccatataaagcgtggattgataaccataaagttgactttgattttgaaaatatacaatatcaagattcgcaatggaaagatgagacgttatttaaattacaacgtcagtttgcatacacgaaagaagagattcataagtatattcaggaacttgtagaaggtaagaaggatcctatcggtgcaatgggatatgatgcgccaattgcagtgttgaacgagcgaccagaatcactatttaattactttaaacagctgtttgcacaagttacgaatccaccaattgatgcgtatcgtgaaaaaatcgtaacgagtgaactttcttatttaggtggcgaaggtaacttactagcacctgacgaaacggttttagatcgtattcaattgaaaaggccggtattgaatgaatcacacttagcagcgattgatcaggaacattttaaattaacttatttatcaacggtatatgaaggggatttggaagatgcgttagaagcattaggccgagaagcagtgaatgctgtaaagcaaggcgctcaaattctagtgttagatgatagtggattagttgatagcaatggctttgcaatgccgatgttactcgcaataagtcatgtgcatcaattacttattaaagcagatttacgtatgtctacaagtttagtcgctaaatctggtgagacacgagaagtgcatcatgttgcttgtttactcgcatatggcgcgaatgcaattgtgccatacctagcgcaacgtacagttgaacaactgacattgacagaagggttacaaggcaccgttgtcgataatgttaagacatatacggatgtattgtcagaaggtgtcattaaagtaatggctaagatgggaatttcgacagtgcaaagttatcaaggggcacaaatatttgaagcgattggcttgtctcatgatgtgattgatcgttattttactgggacacagtctaagttatctggtatttcgattgatcaaattgatgctgaaaataaagcacgtcaacaaagtgatgataattatcttgcatcaggtagtacattccaatggagacaacaaggtcaacatcatgcttttaatccggaatctattttcttattgcagcacgcatgtaaagaaaatgactatgcgcaatttaaagcatactctgaagcggtgaacaaaaatagaacagatcacattagacatttacttgaatttaaagcatgtacaccgattgacatcgaccaagttgaaccggtaagtgacattgtcaaacgctttaatacaggggcgatgagttatggatcgatttcagcggaagcacatgaaacgttagcacaagccatgaaccaattaggtggaaagagtaatagtggtgaaggtggcgaagatgcaaaacgttatgaagtacaagttgatggaagcaacaaagtaagtgcgattaaacaagttgcttctgggcgttttggtgtaactagtgattatttacaacatgccaaagaaattcaaattaaagttgcgcaaggtgcaaagcctggtgaaggtggtcaattacctggtactaaggtatatccgtggattgcgaagacaagagggtcaacgccaggtatcggtctgatttcaccaccgccacatcatgatatttattcaatagaagatttagcgcaactgatacatgatttgaaaaatgcgaataaagatgcagatatcgcggtaaaattagtttcgaaaacaggtgttggtaccattgcatctggggtggcaaaagcatttgcagataaaattgtcatcagtggttacgatggtggtacaggggcttcacccaaaacgagtattcagcatgccggtgttccttgggagattggtttagcagaaacacatcaaacattaaaactaaatgacttaagaagtcgtgttaagttagaaacagacggtaagttattaactggtaaagatgtagcgtacgcatgtgcgcttggagcggaagaatttggatttgcaactgcaccattagtggtgttgggctgtattatgatgcgtgtatgccataaagatacatgtccagtaggagttgcaactcaaaacaaagatttacgtgctttatatagaggtaaagcacatcatgttgttaattttatgcattttattgcacaagaattaagagaaattttagcatctttaggtttgaaacgtgtagaagacttagttggaagaactgatttattacaacgatcatcaacattaaaagcgaatagcaaagcggctagtattgatgttgaaaaactgttatgtcctttcgatgggccaaacacaaaagaaattcaacaaaatcataatcttgagcatggatttgatttaacaaatttatatgaagtaacgaagccatatattgctgaagggcgtcgctatacaggtagctttacagtaaataatgaacaacgtgatgtaggggttattacaggtagtgagatttcgaaacaatatggagaagcaggacttcctgaaaatacaattaatgtttatacgaatggtcatgctggtcaaagtcttgcagcatatgcaccgaaaggcttaatgattcatcatactggagatgcgaatgactatgttggtaaaggattatctggtggtacggtcattgtcaaagcaccttttgaagaacgacaaaatgaaattattgctggtaacgtctcattctatggtgcgacaagtggtaaggcatttattaacggtagtgcaggagaaagattctgtattagaaatagtggtgtagatgttgtcgttgaaggtatcggcgaccatggattagagtatatgactggtggacatgtcattaatttaggtgatgtaggtaagaacttcggtcaaggtatgagtggtggtattgcttacgttatcccgtctgatgtagaagcttttgttgaaaataatcaactagatacgctttcgtttacaaagattaaacaccaagaagaaaaagcattcattaagcaaatgctggaagaacatgtgtcacacacgaatagtacgagagcgattcatgtgttaaaacattttgatcgcattgaagatgtcgtcgttaaagttattcctaaagattatcaattaatgatgcaaaaaattcatttgcacaaatcattacatgacaatgaagatgaagcgatgttagctgcattttacgatgacagtaaaacaatcgatgctaaacataaaccagccgttgtgtattaaggaaagggggagatacgatgggtgaatttaaaggatttatgaagtatgacaaacagtacttaggtgaattatcactggtagaccgtttgaagcatcataaagcatatcaacaacgatttactaaagaagatgcctctatccaaggtgcacgatgtatggattgtggaacgccgttttgtcaaaccggacaacagtatggtagggaaacaataggttgtccaattggaaactacattcctgaatggaacgacttagtgtatcatcaagattttaaaactgcttatgaacgcttaagcgaaacaaataactttcctgactttacagggcgtgtatgtcctgcaccatgcgaaagtgcttgtgtgatgaagattaatagagaatcgattgcgattaaaggtattgaacgcacaattattgatgaagcttttgaaaatggttgggtagcgccgaaagttccgagtcgccgtagagatgaaaaagtggcaatcgttggaagcggtccagcaggattagctgctgctgaagaacttaatctactaggatatcaagtaactatttatgaacgtgctagagaatcaggcggtttattaatgtatggtattccgaatatgaaacttgataaagatgtggttcgacgtcgtattaagttaatggaagaagcgggcattactttcattaatggtgttgaagtcggtgttgatattgataaagcaacgttagaatctgagtatgatgccattatattatgtactggtgcacaaaaaggtagagatttacctttagaaggacgcatgggtgatggtatacatttcgctatggattatttaactgaacaaacgcagttgttaaatggagaaattgatgatataacaataactgcaaaagataagaatgtcattatcattggtgctggtgatacaggggcagactgtgtagcgacagcattaagagaaaattgtaaatcgattgttcaatttaataaatatacgaaattgccagaagcaattacatttacagaaaatgcatcatggcctttagcaatgccggtgtttaaaatggactatgcgcaccaagagtacgaagctaagtttggtaaggaaccacgtgcatatggtgttcaaacaatgcgttacgatgttgacgataaaggacacatacgtggtttgtatactcaaattttagagcaaggcgaaaatggtatggtcatgaaagaaggacctgaaagattttggcctgctgaccttgtattattatcaatcggcttcgaaggtacagaaccaacagtaccgaatgcttttaacattaaaacggatagaaatcgaatcgtggcggatgatacaaactatcaaactaataatgaaaaggtatttgctgctggagatgctagacgtggtcaaagtttagttgtatgggcaattaaagaaggtagaggcgtagcgaaagcagtagatcagtatttagctagtaaagtttgtgtataatctttgtatggaaatggtggttacgttgacgttgtgacatgctgaatcgagtttgaaaaaatctagtatctatcaacgtcacatgccatctttgtaacctaaaaacaaaggtttgtaagacaacaaatagattaattataagtagtgattttttacattcgtttataggtcaactgtagtggaagacaatgatttgtggtaatcatgtaatgcttaaaaacaatattgacttttacagaacgttcatatatgataaatattgtgtttaggaggaatacccaagtccggctgaagggatcggtcttgaaaaccgacaggggcttaacggctcgcgggggttcgaatccctcttcctccgccatcaatatttatattaaattctatatataatgaaggtaagtgctcaaattttgagtatttaccttttttatttgtctttgaatggctcgtaatttttgataatagaaatgataaggcattgagattggaagggcatttggcttgtgcaatatacatagctaaatgtcttttttgttttgtgaaatatgatggatggcttgtgtggacaagtttgctatttatagatatgcatttttcaatttaggagttggccatgcatctacactttataatggtgagagcgtggtgaggtattgttaataacgcaattgtagcgaggagttattgctacatatgtcgttatggctcattgattttctgaaatggctaccccagataattgtgacaaaataaaaatattttgttgaaagcctttacataacttgtctagacaagttatactcgttttaagacattaagggagtgaaatatatggctgtaaaaagagaagatgtaaaagccatcgtaaccgctattgggggaaaagaaaatcttgaagctgcaacgcattgtgtaacacgattacgtttagtgctgaaggatgaaagtaaagttgataaagacgcattaagtaataacgcgttggtcaaggggcagtttaaagcagaccatcaatatcaaattgtcattggtccaggaacagtcgatgaagtgtataagcagtttattgatgaaacaggtgctcaagaagcttcgaaagatgaagcgaaacaagcagctgcacaaaaagggaatccagtacaacgtttgatcaaattgttgggggatatttttataccaatattacctgcgattgtgacagctggtttgttaatgggaatcaataatttacttacaatgaaaggtttatttggtccaaaagcacttattgagatgtatccacaaattgctgatatttcaaacatcattaatgtgattgcgagtacggcatttattttcttaccagcattaattggttggagtagtatgcgtgtatttggtggtagtccgattctaggcatagtcttaggtttgattttaatgcatccgcaattagtatctcagtatgatttggcaaaagggaatattccgacgtggaacttatttggcttagagattaagcagttgaattaccaaggtcaagtgttgccagttttaattgcagcttacgttctagctaaaattgaaaaaggattaaataaagtcgttcacgattcgataaaaatgttggtcgttggacccgtagcgcttttagttactggatttttagcatttattatcattggaccagttgcgttattgattggtacaggtattacatctggtgttacatttatattccaacatgcaggatggcttggcggagcaatatatggattgttatatgcaccacttgtaattacaggactacaccatatgtttttagcagtagatttccaattgatgggtagcagcttaggcggtacgtatttatggccaattgttgcgatttccaatatttgtcagggctctgcagcatttggagcatggtttgtctataaacgtcgtaaaatggttaaagaagaaggcttggcattaacatcttgtatttctggtatgttaggtgttactgaaccagccatgttcggtgtgaacttacctctgaaatatccatttatcgctgcgatatcaacgtcttgtgtattgggggcaatcgttggtatgaataacgtacttggaaaagttggtgttggtggcgtgccagcattcatttcaattcaaaaagaattttggccagtatatcttattgtgacagctattgctattgttgtaccatgtatactaacaattgtgatgtctcattttagtaaacaaaaagcgaaagaaattgttgaagattaataaaataaaaaaggggcgttcgttatttggacgtcctttattacgttataaggtggtaattgtgtgtcgaaagaaatagattggagaaaatccgttgtatatcaaatttatcctaagtcgtttaatgatacgacggggaatggtataggagatatcaatggaattatagaaaaattggattatatcaagttattgggtgttgattatatttggttaacaccagtgtatgaatcaccgatgaatgataatggctatgatatcagcaattatttagaaatcaatgaagactttggaacgatggatgattttgaaaagttaatcaaagttgcgcatcaaaaagacttgaaagtgatgttagatattgtcattaatcatacgtcgacggagcatgaatggtttaaagaagcccgtaaatctaaagataacccttatagagattattactttttcagatcatctgaagacgggccgccaacaaattggcattctaaattcggtggtaatgcatggaagtatgattctgagacagatgaatattatttacatttatttgatgtcagtcaagctgatttaaattgggataatccggaagtacgtcaatcgttatatcgcatagtcaatcattggatagacttcggcgttgatggttttcgatttgatgtcattaacttaatttctaaaggtgaatttaaggactctgacaaaataggtaaagaattttatacggatggtcctagagtgcatgagtttctgcatgaattaaatcgtcaaacgtttggtaacactgacatgatgactataggagaaatgtcttcgacgacgattgaaaattgtattaagtatacacaaccagaacgccaagaattgaatagtgtttttaattttcatcatctaaaggttgattatgttgatggtgaaaagtggacaaatgcgaagcttgattttcataagttaaaggaaattctgatgcaatggcaacgaggtatttatgacggtggcggatggaacgcgattttctggtgtaatcatgatcagccacgggtagtgtctagatttggtgatgatacgtcggaagagatgaggatacaaagtgctaaaatgttagctatcgcactgcatatgttgcaagggacgccatatatttaccaaggtgaagaaattggtatgacggacccacattttacatcaatagcacaatatcgtgatgttgaatcgattaatgcctaccatcagttgttaagtgaagggcatgctgaagcggatgtgttagcgattttaggacagaagtcacgagacaattcgagaacgcctatgcaatggagtgatgatgttaatgctggatttacagctggtaagccttggattgatatttcggaaaattatcatcaggtcaacgttagacaagcacttcagaataaagagtctattttctatacgtatcaaaaattaatacaattaagacatacgcatgatattattacgtatggagacattgtgccacgttttatggatcatgatcatttatttgtttatgaacgtcattataagaatcaacaatggctagtaattgcgaatttctcagcatcggctgttgatttgccagaaggattggctagagaaggttgtgttgtgattcaaacaggcacagtggaaaataatacgataagcgggtttggtgcaattgtaatcgaaacaaacgcgtaaaataaattgagtggatgcgtttatatggcgaaacaaaaaaagtttatgaagatttatgaggcgttgaaagaagatatattaaacgggcagattcaatatggtgaacaaattccgtctgaacatgatttggtgcaattgtaccagtcatctcgagagaccgtgcgtaaggcattagatttgttggcattagacggcatgattcaaaagattcatggtaaagggtcacttgtcatttatcaggaggttacagagtttccattttctgaacttgttagttttaaagaaatgcaagaagaaatgggcgtcgcatatttaactgaagttgttgtgaatgaggttgttgaagcgcatgaagttccagaagttcaacatgctttaaacatcaattctagtgaatcactcattcatattgttagaactcgtcggcttaaccaacatgtgaagattgttgatgaagattattttctaaagtcgattgtttcagatataggtaatgatgttgcgagtgattctatttatgattatttggaaaaggtattaaatcttaatattagttattcaagtaagtctattacttttgaaccgtttgatgaacaagcatatcaattgtttggtgatgtatcggtggcttattcagcaacagttcgaagtattgtgtatttagaaaatacaatgccgtttcaatataatatttcaaaacatcttgcaaatgaatttaaatttaatgacttctcaagacgtcgtataaagtaaacaatgatataaatgatttatacttgcaattaactattaaaatatagtaatatatatcttgccgtgctaggtggggaggtagcggttccctgtactcgaaatccgctttatgcgaggcttaattcctttgttgaggccgtatttttgcgaagtctgcccaaagcacgtagtgtttgaagatttcggtcctatgcaatatgaacccatgaaccatgtcaggtcctgacggaagcagcattaagtggatcatcatatgtgccgtagggtagccgagatttagctaacgactttggttacgttcgtgaattacgttcgatgcttaggtgcacggttttttattttttaaatattaaaccgattattaagagttgaaaatatataattatagaagctactttcttgaagacaattcagcgtattatacgtggaacatgtttgtgggaagtagcttttttatatgtgaagtttgattcaagtgaactcgatgtgcagtttgaatgatttttgtgtcaatgaaaagtaagaagttataatttgatgataaagaaatgatggtgaaatgagggggagtatcttacaatagaattattaatgagatacgttatgattattgacaatcaaatgcctacggaggacatatgcaaatatatttaagtactttaacagagttagattatgataaatctttaaatagtattgaagaaagttttgatgataatcctgaaacgagttggcaagcacgtgcgaaagtaaaacatttaagaaaatctccttgctataattttgaattagaagtaatagcgaaaaatgaaaataacgatgtcgttggacacgttttattaattgaagtagaaattaatagtgatgataagacgtattatggtttggcgattgcctctttatcagttcatcctgaattacgtggacaaaaattaggtcgtggcttggttcaagcagtagaagagcgtgccaaagcacaagagtatagtacggttgttgtagaccattgttttgactactttgaaaagttgggttatcaaaatgctgctgagcatgacattaaattagaatctggtgatgcaccgttacttgtaaaatatttatgggataatttgacggatgcaccacacggaatcgtaaaatttccagaacatttttattaattgttcaattaagaagtaaaggtattatcatgctataatgagaggtaattgtttatggaggtgctaacttgaattatcaagccttatatcgtatgtacagaccccaaagtttcgaggatgtcgtcggacaagaacatgtcacgaagacattgcgcaatgcgatttcgaaagaaaaacagtcgcatgcttatatttttagtggtccgagaggtacggggaaaacgagtattgccaaagtgtttgctaaagcaatcaactgtctaaatagcactgatggagaaccttgtaatgaatgtcatatttgtaaaggcattacgcaggggactaattcagatgtgatagaaattgatgctgctagtaataatggcgttgatgaaataagaaatattagagacaaagttaaatatgcaccaagtgaatcgaaatataaagtttatattatagatgaggtgcacatgctaacaacaggtgcttttaatgcccttttaaagacgttagaagaacctccagcacacgctatttttatattggcaacgacagaaccacataaaatccctccaacaatcatttctagggcacaacgttttgattttaaagcaattagcctagatcaaattgttgaacgtttaaaatttgtagcagatgcacaacaaattgaatgtgaagatgaagccttggcatttatcgctaaagcgtctgaagggggtatgcgtgatgcattaagtattatggatcaggctattgcatttggtgatggtacgttaacattgcaagatgcgttgaatgtcacaggtagcgtacatgatgaagcgttggatcacttgtttgatgatattgtacaaggtgacgtacaagcatcttttaaaaaataccatcagtttataacagaaggtaaagaagtgaatcgcctaataaatgatatgatttattttgtcagagatacgattatgaataaaacatctgagaaagatactgagtatcgagcactgatgaacttagaattagatatgttatatcaaatgattgatcttattaatgatacattagtgtcgattcgttttagtgtgaatcaaaacgttcattttgaagtgttgttagtaaaattagctgagcagattaagggtcaaccacaagtgattgcgaatgtagctgaaccagcacaaattgcttcatcgccaaacacagatgtattgttgcaacgtatggaacagttagagcaagaactaaaaacactaaaagcacaaggagtgagtgtcgctcctgttcaaaaatcttcgaaaaagcctgcgagaggcatacaaaaatctaaaaatgcattttcaatgcaacaaattgcaaaagtgctagataaagcgaataaggcagatatcaaattgttgaaagatcattggcaagaagtgattgatcatgccaaaaataatgataaaaaatcactcgttagtttattgcaaaattcggaacctgtggcggcaagtgaagatcacgtacttgtgaaatttgaggaagagatccattgtgaaatcgtcaataaagacgacgagaaacgtagtagtatagaaagtgttgtatgtaatatcgttaataaaaacgttaaagttgttggtgtaccatcagatcaatggcaaagagttcgaacggaatatttacaaaatcgtaaaaacgaaggcgatgatatgccaaagcaacaagcacaacaaacagatattgctcaaaaagcaaaagatcttttcggtgaagaaactgtacatgtgatagatgaagagtgatacatgacaagcgatataatcgtatgtataatgaaagaaacatcattttattgataaatatttattgattttcaaggaggaaatggaatatgcgcggtggcggaaacatgcaacaaatgatgaaacaaatgcaaaaaatgcaaaagaaaatggctcaagaacaagaaaaacttaaagaagagcgtattgtaggaacagctggcggtggcatggttgcagttactgtaactggtcataaagaagttgtcgacgttgaaatcaaagaagaagctgtagacccagacgatattgaaatgctacaagacttagtgttagcagctactaatgaagcgatgaataaagctgatgagcttactcaagaacgtttaggtaaacatactcaaggcttaaacatccctggaatgtgatcatagatgcattatccagaacctatatcaaaacttattgatagctttatgaaattgccaggcattggtccaaagacagcccaacgtctggcttttcataccttagatatgaaagaagacgatgttgttcagtttgccaaagcattagtagatgttaagagagaattaacatattgtagcgtatgtggtcacattactgaaaatgatccatgttatatttgtgaagataagcaaagagatcgttcagttatttgtgttgtggaagatgacaaagatgtcatagctatggaaaaaatgagagaatacaaaggtttatatcacgttttacatgggtctatttcgcctatggatggcattggaccagaagatattaatattccttcattgattgaacgcttgaaaaacgatgaagttagcgaattaatcttagctatgaacccgaacttagagggggaatctacagccatgtatatttctagattagttaagcctataggtatcaaagtgacgagattagcacaagggttatcggtaggtggcgatttagagtatgctgacgaagtaacattatctaaagcaatcgcaggtagaacagaaatgtaatgtcttctattaaacatttttgattttaatactatagtaagaaaagtcacagtgtaatcattgtggctttttttatggtgtggtgtgatgtactactttatttgcggtgtggcggtggtatggtttacctagttttactgagggatgggtaatctttaggaagcaagccgttggttgtgatttgttacttctaatagtaatgatgtgaattggattatcgaattagatctatggttatggtgtgttggtgctattaatttgataaatgcggttaatgactatgcaaatgaaattcttttgtaattgaaatgatagatgctggcttagtaagttgtacttctttggtctaaagcttattaaatcagcctgtatagcggtgttttgagagattatttaaaacttgtaaatttatttttaatttctggtaaaaaaataacgttctgttttgcgttttttttgattgatatggttagagaaaaatctgtttcttgttctaaaaaacgtactatttataagtggggattttttaagttcgatttttaggataagggcgttcagtacagatgacaaaggtgtaatttttactgttgttaagcagtttgaaagcctgtatagtatttatttgttgaggcaaacaaaacaactcaacttaagaaataacttgaattactaacgaaaattaattttaaaaagttattgacttaaatgttaataaaatgtataattaattcttgtcggtaagaaaaatgaacattgaaaactgaatgacaatatgtcaacgttaattccaaaaacgtaactattagttacaaacattatttagtatttatgagctaatcaaacatcataatttttatggagagtttgatcctggctcaggatgaacgctggcggcgtgcctaatacatgcaagtcgagcgaacggacgagaagcttgcttctctgatgttagcggcggacgggtgagtaacacgtggataacctacctataagactgggataacttcgggaaaccgtagctaataccggataatattttgaaccgcatggttcaaaagtgaaagacggtcttgctgtcacttatagatggatccgcgctgcattagctagttggtaaggtaacggcttaccaaggcaacgatgcatagccgacctgagagggtgatcggccacactggaactgagacacggtccagactcctacgggaggcagcagtagggaatcttccgcaatgggcgaaagcctgacggagcaacgccgcgtgagtgatgaaggtcttcggatcgtaaaactctgttattagggaagaacatatgtgtaagtaactgtgcacatcttgacggtacctaatcagaaagccacggctaactacgtgccagcagccgcggtaatacgtaggtggcaagcgttatccggaattattgggcgtaaagcgcgcgtaggcggttttttaagtctgatgtgaaagcccacggctcaaccgtggagggtcattggaaactggaaaacttgagtgcagaagaggaaagtggaattccatgtgtagcggtgaaatgcgcagagatatggaggaacaccagtggcgaaggcgactttctggtctgtaactgacgctgatgtgcgaaagcgtggggatcaaacaggattagataccctggtagtccacgccgtaaacgatgagtgctaagtgttagggggtttcccgccccttagtgctgcagctaacgcattaagcactccgcctggggagtacgaccgcaaggttgaaactcaaaggaattgacggggacccgcacaagcggtggagcatgtggtttaattcgaagcaacgcgaagaaccttaccaaatcttgacatcctttgacaactctagagatagagccttccccttcgggggacaaagtgacaggtggtgcatggttgtcgtcagctcgtgtcgtgagatgttgggttaagtcccgcaacgagcgcaacccttaagcttagttgccatcattaagttgggcactctaagttgactgccggtgacaaaccggaggaaggtggggatgacgtcaaatcatcatgccccttatgatttgggctacacacgtgctacaatggacaatacaaagggcagcgaaaccgcgaggtcaagcaaatcccataaagttgttctcagttcggattgtagtctgcaactcgactacatgaagctggaatcgctagtaatcgtagatcagcatgctacggtgaatacgttcccgggtcttgtacacaccgcccgtcacaccacgagagtttgtaacacccgaagccggtggagtaaccttttaggagctagccgtcgaaggtgggacaaatgattggggtgaagtcgtaacaaggtagccgtatcggaaggtgcggctggatcacctcctttctaaggatatattcggaacatcttcttcagaagatgcggaataacgtgacatattgtattcagttttgaatgtttatttaacattcaaatattttttggttaaagtgatattgcttatgaaaataaagcagtatgcgagcgcttgactaaaaagaaattgtacattgaaaactagataagtaagtaaaatatagattttaccaagcaaaaccgagtgaataaagagttttaaataagcttgaattcataagaaataatcgctagtgttcgaaagaacactcacaagattaataacgcgtttaaatctttttataaaagaacgtaacttcatgttaacgtttgacttataaaaatggtggaaacatagattaagttattaagggcgcacggtggatgccttggcactagaagccaatgaaggacgttactaacgacgatatgctttggggagctgtaagtaagctttgatccagagatttccgaatggggaaacccagcatgagttatgtcatgttatcgatatgtgaatacatagcatatcagaaggcacacccggagaactgaaacatcttagtacccggaggaagagaaagaaaattcgattcccttagtagcggcgagcgaaacgggaagagcccaaaccaacaagcttgcttgttggggttgtaggacactctatacggagttacaaaggacgacattagacgaatcatctggaaagatgaatcaaagaaggtaataatcctgtagtcgaaaatgttgtctctcttgagtggatcctgagtacgacggagcacgtgaaattccgtcggaatctgggaggaccatctcctaaggctaaatactctctagtgaccgatagtgaaccagtaccgtgagggaaaggtgaaaagcaccccggaaggggagtgaaatagaacctgaaaccgtgtgcttacaagtagtcagagcccgttaatgggtgatggcgtgccttttgtagaatgaaccggcgagttacgatttgatgcaaggttaagcagtaaatgtggagccgtagcgaaagcgagtctgaatagggcgtttagtatttggtcgtagacccgaaaccaggtgatctacccttggtcaggttgaagttcaggtaacactgaatggaggaccgaaccgacttacgttgaaaagtgagcggatgaactgagggtagcggagaaattccaatcgaacctggagatagctggttctctccgaaatagctttagggctagcctcaagtgatgattattggaggtagagcactgtttggacgaggggcccctctcgggttaccgaattcagacaaactccgaatgccaattaatttaacttgggagtcagaacatgggtgataaggtccgtgttcgaaagggaaacagcccagaccaccagctaaggtcccaaaatatatgttaagtggaaaaggatgtggcgttgcccagacaactaggatgttggcttagaagcagccatcatttaaagagtgcgtaatagctcactagtcgagtgacactgcgccgaaaatgtaccggggctaaacatattaccgaagctgtggattgtcctttggacaatggtaggagagcgttctaagggcgttgaagcatgatcgtaaggacatgtggagcgcttagaagtgagaatgccggtgtgagtagcgaaagacgggtgagaatcccgtccaccgattgactaaggtttccagaggaaggctcgtccgctctgggttagtcgggtcctaagctgaggccgacaggcgtaggcgatggataacaggttgatattcctgtaccacctataatcgttttaatcgatggggggacgcagtaggataggcgaagcgtgcgattggattgcacgtctaagcagtaaggctgagtattaggcaaatccggtactcgttaaggctgagctgtgatggggagaagacattgagtcttcgagtcgttgatttcacactgccgagaaaagcctctagatagaaaataggtgcccgtaccgcaaaccgacacaggtagtcaagatgagaattctaaggtgagcgagcgaactctcgttaaggaactcggcaaaatgaccccgtaacttcgggagaaggggtgctctttagggttaacgcccagaagagccgcagtgaataggcccaagcgactgtttatcaaaaacacaggtctctgctaaaccgtaaggtgatgtataggggctgacgcctgcccggtgctggaaggttaagaggagtggttagcttctgcgaagctacgaatcgaagccccagtaaacggcggccgtaactataacggtcctaaggtagcgaaattccttgtcgggtaagttccgacccgcacgaaaggcgtaacgatttgggcactgtctcaacgagagactcggtgaaatcatagtacctgtgaagatgcaggttacccgcgacaggacggaaagaccccgtggagctttactgtagcctgatattgaaattcggcacagcttgtacaggataggtaggagcctttgaaacgtgagcgctagcttacgtggaggcgctggtgggatactaccctagctgtgttggctttctaacccgcaccacttatcgtggtgggagacagtgtcaagcgggcagtttgactggggcggtcgcctcctaaaaggtaacggaggcgctcaaaggttccctcagaatggttggaaatcattcatagagtgtaaaggcataagggagcttgactgcgagacctacaagtcgagcagggtcgaaagacggacttagtgatccggtggttccgcatggaagggccatcgctcaacggataaaagctaccccggggataacaggcttatctcccccaagagttcacatcgacggggaggtttggcacctcgatgtcggctcatcgcatcctggggctgtagtcggtcccaagggttgggctgttcgcccattaaagcggtacgcgagctgggttcagaacgtcgtgagacagttcggtccctatccgtcgtgggcgtaggaaatttgagaggagctgtccttagtacgagaggaccgggatggacatacctctggtgtaccagttgtcgtgccaacggcatagctgggtagctatgtgtggacgggataagtgctgaaagcatctaagcatgaagcccccctcaagatgagatttcccaacttcggttataagatccctcaaagatgatgaggttaataggttcgaggtggaagcatggtgacatgtggagctgacgaatactaatcgatcgaagacttaatcaaaataaatgttttgcgaagcaaaatcacttttacttactatctagttttgaatgtataatctacattcatatgtctggtgactatagcaaggaggtcacacctgttcccatgccgaacacagaagttaaggtctttagcgacgatggtagccaacttacgttccgctagagtagaacgttgccaggcaaaaaatggatgcgatgagccgcattgagaccgcaaggtctcttttttttatgcctaaaacgtcaaaataaaaagtaaacacaaagaaaaatggcttggcgaagtgaaaacgtttgaatctgacgaaacgagaaaagagcgcaacgagtttagtagagctaaatgagtaagcgagagccgaaggagaggaaagaagcaagcgattgtcacaagtcaagaaaggtctttagcgacgatggtagccaacttacgttccgctagagtagaacgttgccaggcaagttgagaccgtgaggtctctttttttatgtctaaaacgtcaaaataaaaagtaaacacaaagaaaaatggcttggcgaagtgaaaacgtttgaatctgacgaaacgagaaaagagcgcaacgagtttagtagagctaaatgagtaagcgagagccgaaggagaggaaagaagcaagcgattgtcacaagtcaagaaaggttcttagcgaggatggtagctaacttacgttccgctagagtagaacgttgctagacaagaaatgaatgcgatgagccgcattgagtgtgaaattgatattttaataatgtgcacttttgattatttaaatctgtgactagaagtataagtgaagacattcagaagtattataaaaagtgaacagcagtaagatagtttttaatcataaatcatcttactgctgtttttagattttatgtctaatatcttttaaatcgaagtacaaaaaggaaattaattattatacaatagacaagctattgcataagtaacactaacttttgtcaaagaagtgttactatataattaatacttttgaaagtaactaattccaaaacagtgtaaataaaggaagcgtatatcatgaagcaacctattttaaataaattagaaagtttaaatcaagaagaagcgatttctttgcatgttccgggtcataaaaatatgactatcggtcatttatctcaattatcaatgacaatggataaaactgaaatacctggattagatgatttacatcatcctgaagaagtcattttggaaagtatgaagcaggtggagaaacattcagattatgatgcttatttcttagtgaatggcaccacttcaggaatattatctgtcatccagtctttttcacagaaaaaaggcgatatcttaatggcaagaaatgtacataaatctgtgttacatgcgctcgatattagccaacaagaagggcattttattgaaacgcatcaaagtccgttaacgaatcattataataaagttaatttaagccgtttgaataatgacggtcacaaacttgctgtgttgacttatcctaactattacggtgaaacatttaatgtagaagaggttatcaaatctttgcaccaattaaatattcctgtactcattgacgaagcacacggcgcgcactttggattgcaaggatttccagattctacattaaattatcaagctgactatgttgttcaatcttttcataaaacgttaccagctttaacgatgggctcggtactttatattcataaaaatgcaccttatagagaaactattatagaatatctaagctacttccaaacatctagtccttcgtatttgattatggctagtttagagtcagctgccgagttctataaaacatatgatagtaccgtgttttttgataagagagcgcaattaatcgaatgtttggagaagaagggttttgaaatgcttcaagttgatgatccgttgaagttgctgataaaatatgaaggttttacaggtcatgatattcaaaattggtttatgaatgcacatatctatttagaattagcggacgactatcaagcattagcgatattgccgttatggcatcatgatgatacgtatttatttgattcgcttttacgtaaaattgaagatatgattttaccgaaaaaatcagtttctaaagttaaacaaacacaacttttaacaactgaaggtaactataaaccaaaacgctttgaatatgttacttggtgtgatttgaaaaaggcaaaaggtaaagttctggcgcgacatattgtcccgtatccgccagggattcctattattttcaaaggagaaacaataactgaaaatatgatagaattggtaaatgaatatctggaaactggaatgatagttgaaggaattaaaaataataaaattttagttgaggatgaataaaatgtcagcttttataacttttgagggcccagaaggctctggaaaaacaactgtaattaatgaagtttaccatagattagtaaaagattatgatgtcattatgactagagaaccaggtggtgttcctactggtgaagaaatacgtaaaattgtattagaaggcaatgatatggacattagaactgaagcaatgttatttgctgcatctagaagagaacatcttgtattaaaggtcataccagctttaaaagaaggtaaggttgtgttgtgtgatcgctatatcgatagttcattagcttatcaaggttatgctagagggattggcgttgaagaagtaagagcattaaacgaatttgcaataaatggattatatccagacttgacgatttatttaaatgttagtgctgaagtaggtcgcgaacgtattattaaaaattcaagagatcaaaatagattagatcaagaagatttaaagtttcacgaaaaagtaattgaaggttaccaagaaatcattcataatgaatcacaacggttcaaaagcgttaatgcagatcaacctcttgaaaatgttgttgaagacacgtatcaaactatcatcaaatatttagaaaagatatgatataattgttagaagaggtgttataaaatgaaaatgattatagcgatcgtacaagatcaagatagtcaggaacttgcagatcaacttgttaaaaataactttagagcaacaaaattggcaacaacaggtgggtttttaagagcgggtaatacaacattcttatgtggtgtcaatgatgaccgtgtagatgaaatattgtctgtgattaatcaaacgtgtggtaatagagaacagttggtttcacctattacacctatgggaggcagtgcggattcgtacattccatatccagttgaagttgaagttggcggtgctactgtatttgttatgccagttgatgcattccatcaattttaattctataatacaatcatcaattagagatacttaaaatagtgtattaataagttattaacaattttgggttgcttgactgcgactagttcagatgccaatagatttgatttttgtggttctaaaaataatcacaaatcatggtcgctattgttgcagtaattagttgctctttggcaacctttttatataaaagcaaaagggagtttgtaatgaatggatgaacagcaacaattgacgaatgcatatcattcaaataaattatcgcatgcctatttatttgaaggtgatgatgcacaaacgatgaaacaagttgcgattaattttgcaaagcttattttatgtcaaacagatagtcaatgtgaaacaaaggttagtacatataatcatccagactttatgtatatatcaacaactgagaatgcaattaagaaagaacaagttgaacaacttgtgcgtcatatgaatcaacttcctatagaaagcacaaataaagtgtacatcattgaagactttgaaaagttaactgttcaaggggaaaacagtatcttgaaatttcttgaagaaccaccggacaatacgattgctattttattgtctacaaaacctgagcaaattttagacacaatccattcaaggtgtcagcatgtatatttcaagcctattgataaagaaaagtttataaatagattagttgaacaaaacatgtctaagccagtagctgaaatgattagtacttatactacgcaaatagataatgcaatggctttaaatgaagaatttgatttattagcattaaggaaatcagttatacgttggtgtgaattgttgcttactaataagccaatggcacttataggtattattgatttattgaaacaggctaaaaataaaaaactgcaatctttaactattgcagctgtgaatggtttcttcgaagatatcatacatacaaaggtaaatgtagaggataaacaaatatatagtgatttaaaaaatgatattgatcaatatgcgcaaaagttgtcgtttaatcaattaattttgatgtttgatcaactgacggaagcacataagaaattgaatcaaaatgtaaatccaacgcttgtatttgaacaaatcgtaattaagggtgtgagttagatgccaaatgtaataggtgttcagtttcaaaaagcgggaaaattagaatattatacacctaatgatatacaagtagatatagaagactgggtagttgtcgaatctaaaagaggcatagagataggtattgttaaaaatccattaatggatattgctgaagaggatgttgtgttacctcttaaaaatattattcgcattgctgatgacaaagatattgataaatttaattgtaatgaacgagatgctgaaaatgcattaatactatgtaaagacattgtaagagaacaaggtttggacatgcgtttagtcaattgcgaatatacattagataaatcgaaagttatttttaattttacggcggatgatcgtattgattttagaaaattagtaaaaatattagcgcaacatttaaaaacacgtatcgagttgagacaaattggtgtaagggatgaagccaaattgcttggcggtatcggaccttgtggtaggtcgttatgttgttctacatttttaggggattttgaaccagtatcgattaagatggctaaggatcaaaatttatcattaaatccaactaaaatttctggtgcatgtggtcgtttgatgtgttgtttaaaatatgaaaatgactattatgaggaagtacgtgcacaattacctgatattggtgaagcaattgaaacgcctgatggtaacgggaaagtagttgctttaaatatattagacatttctatgcaggtgaagcttgagggacatgaacagccacttgaatataaattagaagaaatagaaactatgcattaaggaggcattattacatttggatcgcaatgaaatatttgaaaaaataatgcgtttagaaatgaatgtcaatcaactttcaaaggaaacttcagaattaaaggcacttgcagttgaattagtagaagaaaatgtagcgcttcaacttgaaaatgataatttgaaaaaggtgttgggcaatgatgaaccaactactattgatactgcgaattcaaaaccagcaaaagctgtgaaaaagccattaccaagtaaagataatttggctatattgtatggagaaggatttcatatttgtaaaggcgaattatttggaaaacatcgacatggtgaagattgtctgttctgtttagaagttttaagtgattaatcaagcacactcaaatagtgttataattataaatgaatatggtttggataagtctgagacaatgcatgtttcaggctttaattgtgtataaagttttggtgattgcataagagatggcggtactaaatgttattattaagtgtgcacgcagtatcattagttataaaatgtagctgttaaaagtcaaaaatacatcgaatgtagttaggcatataatataaaaagagttttcaattactcaatagaaaaaggttgtcttcataggagttaaaaatgttaaaagagaatgaacgatttgatcaactaatcaaagaagattttagtattattcaaaatgatgatgttttttcattttcaacggatgctttgttgttagggcattttacaaaacctagaacaaaagatattgtgttggacttatgttcaggcaatggggtgatacccttgttattgtttgcgaaacatccacgacatatagaaggtgttgagattcaaaaaacacttgtcgatatggcgcgacgcacatttcaattcaatgatgttgatgaatatttaacaatgcatcacatggatttgaaaaacgttactaaagtatttaaaccttcacaatatactttagtaacgtgtaatccgccttattttaaagagaatcagcaacaccaacatcaaaaagaagcacataagatagcgagacatgagattatgtgtacacttgaagattgcatgattgcagcccgtcatttattaaaagaaggtggcaggctaaacatggtacatcgtgcagagagactaatggatgtcttgtttgaaatgagaaaagtgaatattgaacctaagaaagtcgtttttatatatagtaaagtagggaaatcagcacaaacgatagtagtagaaggtcgaaaaggtggaaatcaaggtttagaaatcatgcccccattttatatttataatgaagatggtaattatagcgaagaaatgaaggaagtatattatggatagtcattttgtatatattgtaaaatgtagtgatggaagtttatatacaggatacgctaaagacgttaatgcacgtgttgaaaaacataaccgaggtcaaggagccaaatatacgaaagtaagacgtccggtgcatttagtttatcaagaaatgtatgagacaaagtctgaagcattgaagcgtgaatatgaaattaaaacttataccagacaaaagaaattgcgattaattaaggagcgatagtatggctgtattatatttagtgggcacaccaattggtaatttagcagatattacttatagagcagttgatgtattgaaacgtgttgatatgattgcttgtgaagacactagagtaactagtaaactgtgtaatcattatgatattccaactccattaaagtcatatcacgaacataacaaggataagcagactgcttttatcattgaacagttagaattaggtcttgacgttgcgctcgtatctgatgctggattgcccttaattagtgatcctggatacgaattagtagtggcagccagagaagctaatattaaagtagagactgtgcctggacctaatgctgggctgacggctttgatggctagtggattaccttcatatgtatatacatttttaggatttttgccacgaaaagagaaagaaaaaagtgctgtattagagcaacgtatgcatgaaaatagcacattaattatatacgaatcaccgcatcgtgtgacagatacattaaaaacaattgcaaagatagatgcaacacgacaagtatcactagggcgtgaattaactaagaagttcgaacaaattgtaactgatgatgtaacacaattacaagcattgattcagcaaggcgatgtaccattgaaaggcgaattcgttatcttaattgaaggtgctaaagcgaacaatgagatatcgtggtttgatgatttatctatcaatgagcatgttgatcattatattcaaacttcacagatgaaaccaaaacaagctattaaaaaagttgctgaagaacgacaacttaaaacgaatgaagtatataatatttatcatcaaataagttaatcactttatcgattatatgaaattttaaacgattttataaacgcaagctgtaattttaaatggtaagttatcattttgcattgatactgataaaatgatgttgactatgataaaaaaatgatgacatcgacgttttttaatgtaaaataaatacattgaaagtaataaataccttaacattgaataagatgaaaatgagatgacgagataaatgttcgcgtccgttgaaatgcatagaaatcttagatattatttgaagtgagacattacgaggaggaacagttatggctaaagaaacattttatataacaaccccaatatactatcctagtgggaatttacatataggacatgcatattctacagtggctggagatgttattgcaagatataagagaatgcaaggatatgatgttcgctatttgactggaacggatgaacacggtcaaaaaattcaagaaaaagctcaaaaagctggtaagacagaaattgaatatttggatgagatgattgctggaattaaacaattgtgggctaagcttgaaatttcaaatgatgattttatcagaacaactgaagaacgtcataaacatgtcgttgagcaagtgtttgaacgtttattaaagcaaggtgatatctatttaggtgaatatgaaggttggtattctgttccggatgaaacatactatacagagtcacaattagtagacccacaatacgaaaacggtaaaattattggtggcaaaagtccagattctggacacgaagttgaactagttaaagaagaaagttatttctttaatattagtaaatatacagaccgtttattagagttctatgaccaaaatccagattttatacaaccaccatcaagaaaaaatgaaatgattaacaacttcattaaaccaggacttgctgatttagctgtttctcgtacatcatttaactggggtgtccatgttccgtctaatccaaaacatgttgtttatgtttggattgatgcgttagttaactatatttcagcattaggctatttatcagatgatgagtcactatttaacaaatactggccagcagatattcatttaatggctaaggaaattgtgcgattccactcaattatttggcctattttattgatggcattagacttaccgttacctaaaaaagtctttgcacatggttggattttgatgaaagatggaaaaatgagtaaatctaaaggtaatgtcgtagaccctaatattttaattgatcgctatggtttagatgctacacgttattatctaatgcgtgaattaccatttggttcagatggcgtatttacacctgaagcatttgttgagcgtacaaatttcgatctagcaaatgacttaggtaacttagtaaaccgtacgatttctatggttaataagtactttgatggcgaattaccagcgtatcaaggtccacttcatgaattagatgaagaaatggaagctatggctttagaaacagtgaaaagctacactgaaagcatggaaagtttgcaattttctgtggcattatctacggtatggaagtttattagtagaacgaataagtatattgacgaaacaacgccttgggtattagctaaggacgatagccaaaaagatatgttaggcaatgtaatggctcacttagttgaaaatattcgttatgcagctgtattattacgtccattcttaacacatgcgccgaaagagatttttgaacaattgaacattaacaatcctcaatttatggaatttagtagtttagagcaatatggtgtgcttaatgagtcaattatggttactgggcaacctaaacctattttcccaagattggatagcgaagcggaaattgcatatatcaaagaatcaatgcaaccgcctgctactaaagaggaaaaagaagagattcctagcaaacctcaaattgatattaaagactttgataaagttgaaattaaggcagcaacgattattgatgctgaacatgttaagaagtcagataagcttttaaaaattcaagtagacttagattctgaacaaagacaaattgtatcaggaattgccaaattctatacaccagatgatattattggtaaaaaagtagcagttgttactaacctgaaaccagctaaattaatgggacaaaaatctgaaggtatgatattatctgctgaaaaagatggtgtattaaccttagtaagtttaccaagtgcaattccaaatggtgcagtgattaaataactgtatttttaaaaattaggagagataattatgttaatcgatacacatgtccatttaaatgatgagcaatacgatgatgatttgagtgaagtgattacacgtgctagagaagcaggtgttgatcgtatgtttgtagttggttttaacaaatcgacaattgaacgcgcgatgaaattaatcgatgagtatgattttttatatggcattatcggttggcatccagttgacgcaattgattttacagaagaacacttggaatggattgaatctttagctcagcatccaaaagtgattggtattggtgaaatgggattagattatcactgggataaatctcctgcagatgttcaaaaggaagtttttagaaagcaaattgctttagctaagcgtttgaagttaccaattatcattcataaccgtgaagcaactcaagactgtatcgatatcttattggaggagcatgctgaagaggtaggcgggattatgcatagctttagtggttctccagaaattgcagatattgtaactaataagctgaatttttatatttcattaggtggacctgtgacatttaaaaatgctaaacagcctaaagaagttgctaagcatgtgtcaatggagcgtttgctagttgaaaccgatgcaccgtatctttcgccacatccgtatagagggaagcgaaatgaaccggcgagagtaactttagtagctgaacaaattgctgaattaaaaggcttatcttatgaagaagtgtgcgaacaaacaactaaaaatgcagagaaattgtttaatttaaattcataaagttaaaagtgagaaagatcaccgccataaatgtaaacgatgctatattcgtttaatatgctatggttctttctcacttttttaaattaaaatatcgtgcatgtggaatacgtgcgatagagatggttagagctttgaaattaagaattgtaggaaggcgttttaaatgaaaatcaatgagtttatagttgtagaaggacgagatgatactgagcgtgttaaacgagctgttgaatgtgatacgattgaaacgaatggtagtgccatcaacgaacaaactttagaagtaattagaaatgctcaacaaagtcgaggcgttattgtattaacagatccagatttcccaggagataaaattagaagtacaattactgaacatgtcaaaggtgttaaacatgcgtatattgatagagaaaaagctaaaaataaaaaagggaaaattggtgttgaacatgccgacttaattgatattaaagaagcgttaatgcatgttagttcaccctttgatgaagcttatgaatcaattgataaatctgtgctaatagagttggggttaattgttgggaaagatgcaaggcgccgtagagaaattttaagtagaaaattgcgaatcggccattccaatggtaagcagttattgaaaaagttaaatgcatttggttataccgaagcggatgtaaggcaagctttagaagatgaatgaggaagtgaaaatgttggataataaagatattgcaacaccatcaagaacgcgagcgttgttagataaatatggctttaattttaaaaaaagtttaggacagaactttttgatagatgtgaatatcattaataatatcattgatgcaagtgatattgatgcacaaactggggtgattgaaattggtccaggcatggggtcattgacagaacaattggccagacatgctaaaagagtattggcatttgaaattgatcaacgtttaatacctgtattaaatgatacactatcaccttatgataatgtgacggtgattaatgaagatattttaaaagcgaatattaaagaagctgttgaaaatcatttacaagattgtgaaaaaataatggttgttgcaaacctgccgtactatattacgacgccaattttattaaatttgatgcaacaagatataccaattgatggctacgtggtgatgatgcaaaaagaagtgggcgaacgcttaaatgctgaagtaggttcaaaagcatatggttcgttatcaattgtcgtacaatactatacagagactagtaaagtattaacggtacctaaatctgtatttatgccaccacctaatgttgattcaatagttgtaaaactgatgcagagaactgaaccgttagtaacagtagataacgaggaagcattctttaagttagcaaaagcagcatttgcacaaagaagaaagacaattaacaataactatcaaaattattttaaagatggtaaacaacacaaagaagtgattttacaatggttggaacaagcaggtattgatccaagacgtcgcggtgaaacgctatctattcaagattttgctaaattgtatgaagaaaagaaaaaattccctcaattagaaaattaaatgattgacaaagcaaagcactattgttaaaatttaaattttgtttgacgaaaacgttgcaaatatggtattatgtaacttgtagcgaggtggagcaatatgccaaaatcaattttggacatcaaaaattctattgattgtcatgtaggaaatcgtattgtactgaaagccaatggaggccgtaagaaaacaataaaacgttctggaattttaaaagaaacatatccgtcagttttcattgttgagttagatcaagacaaacacaactttgagagagtatcttatacatacactgatgtgttaactgaaaatgttcaagtttcatttgaagaggataatcatcacgaatcaattgcacactaaataagacatatagagatgttagacgtttcttagtataagaagtaaatattatgataattatttgagtgttgggcattatgttcaatactctttttatttacaaaatgtttaacactgatgtttcgcttatagatttttcagtaaatggataattgtatttataaacacaaatacaagtaaatactaagtaattagatggagaaaattacttttttattaaaaaaacactaaaaaacaaattaaaatgtcaaatattaattctctttatgttaaaatcatcatattaagataacgaaaagagggcggaaaatgatatatgaaacggcaccagccaaaattaattttacgctcgatacactttttaaaagaaatgatggctatcatgagattgaaatgataatgacaacagttgatttaaatgatcgtttaacttttcataaaagaaaagatcgaaagatagttgttgagattgaacataattatgtgccttctaatcataaaaatctcgcatatcgtgcagcgcaactatttattgagcaatatcaactaaagcaaggtgtaacaatttctatcgataaagaaatacctgtttctgctggcttagctggaggttcggctgatgcagcagcaacgttaagaggattgaatcgactttttgatataggggcgagtttggaagaattggctctactaggcagtaaaatcgggacagatattccgttttgtatttataataaaactgcactatgtactggaagaggagagaaaatcgagtttttaaataaaccaccttcagcttgggtgattcttgctaaaccaaacttaggcatatcatcaccagatatatttaagttgattaatttagataagcgttacgacgtacatacgaaaatgtgttatgaggccttagaaaatcgagattatcaacaattatgtcaaagtttgtctaatcgattagagccaatttctgtttcaaaacacccacaaatcgataaattaaaaaataatatgttgaaaagtggtgcagatggtgcgttaatgagtggaagcggacctactgtgtatgggctagcacgaaaagaaagccaagcaaaaaatatttataatgcagttaacggttgttgtaatgaagtgtacttagttagactattaggatagaagggttgaaaagatgagatataaacgaagcgagagaattgtttttatgacgcaatatttgatgaaccatccgaataaattgattccattaactttttttgtgaaaaaatttaaacaggcgaagtcttcaataagtgaagatgtccaaattataaaaaatacattccaaaaagaaaagttaggtacagtaattactactgctggcgcaagtggtggtgttacgtataaaccaatgatgagtaaagaagaggcgactgaagttgttaatgaggtcattactctattagaagagaaagaacgtttgttacctggcggatatttatttttatcagatttggtaggtaatccatcgctactaaacaaagttggtaagttaattgccagtatttacatggaagaaaaattagatgctgttgttaccattgcgacaaaaggtatttcattggcaaatgcggttgctaatattttaaatttaccagtagtagtgattagaaaagacaacaaggtgactgaaggttctacagtttcaattaattacgtttcaggatcttcaagaaaaatagaaacaatggtactttcgaagagaactttagcagaaaattcaaatgttttagttgtcgatgattttatgagggctggtggctctattaatggtgttatgaatttaatgaatgagtttaaagcccatgtaaaaggggtatcagtacttgtagaatcaaaagaagttaaacaaagattgattgaagattatacttccttagtgaaattatctgatgtagatgaatataatcaagagtttaacgtagaacctggcaacagtttatctaagttttcataaaaggagttttagtattatgaaaatcattaacacaacaagattaccggaagcacttggaccatattcgcatgcaacagttgtgaatggtatggtttatacttctggtcagattccattgaatattgatggacatatcgtaagcgctgatgttcaagcacagacaaaacaagttttagaaaatttaaaggttgttttggaagaagcaggatctgatttgaattctgttgcgaaagcgaccattttcattaaagatatgaatgatttccaaaaaataaatgaagtgtatggtcaatattttaatgaacacaagccagcgcgtagttgtgtagaggttgcgcgtttgccaaaagatgtgaaagtagaaattgaattagtaagtaaaattaaggaattataattttcgattaatatgtttaatcaagcttctaaataaaacagagagatatatactataggggggctcactacatgaaagtgacagatgtaagacttagaaaaatacaaacagatggacgaatgaaagcactcgtttccattacattagatgaagctttcgtaattcatgatttacgtgtaattgaaggaaactctggcttgttcgttgcaatgccaagtaaacgtacaccagatggtgaattccgcgacatcgcgcatcctattaattcagatatgagacaagaaattcaagatgcagtgatgaaagtatatgatgaaacagatgaagtagtaccagataaaaacgctacatcagaagattcagaagaagcttaatcaattttatatttagcgatgtaatacatttgcaataagttgatttgatactgtcgataaagcataaagctttgtcggcagtttttttagtttgtattaatgtttttttatttttaatgaaaggctaataaatatatacgttaacagattatgatgatatgaaaattattgattcattgctgataaaaattgcgtttgaatgatgctcgtatttttgaagtaagaaaaaagttgtttttaaaattacaacgaattaaaaacaatgccttttatatgttgaaagagtattgcagattaaattataataatgacgaagtgtaaaatttaatgggggttaatgttcatgcgaagacacgcgataattttggcagcaggtaaaggcacaagaatgaaatctaaaaagtataaagtgctacacgaggttgctgggaaacctatggtcgaacatgtattggaaagtgtgaaaggctctggtgtcgatcaagttgtaaccatcgtaggacatggtgctgaaagtgtaaaaggacatttaggcgagcgttctttatacagttttcaagaggaacaactcggtactgcgcatgcagtgcaaatggcgaaatcacacttagaagacaaggaaggtacgacaatcgttgtatgtggtgacacaccgctcatcacaaaggaaacattagtaacattgattgcgcatcacgaggatgctaatgctcaagcaactgtattatctgcatcgattcaacaaccatatggatacggaagaatcgttcgaaatgcgtcaggtcgtttagaacgcatagttgaagagaaagatgcaacgcaagctgaaaaggatattaatgaaattagttcaggtatttttgcgtttaataataaaacgttgtttgaaaaattaacacaagtgaaaaatgataatgcgcaaggtgaatattacctccctgatgtattgtcgttaattttaaatgatggcggcatcgtagaagtctatcgtaccaatgatgttgaagaaatcatgggtgtaaatgatcgtgtaatgcttagtcaggctgagaaggcgatgcaacgtcgtacgaatcattatcacatgctaaatggtgtgacaatcatcgatcctgacagcacttatattggtccagacgttacaattggtagtgatacagtcattgaaccaggcgtacgaattaatggtcgtacagaaattggcgaagatgttgttattggtcagtactctgaaattaacaatagtacgattgaaaatggtgcatgtattcaacagtctgttgttaatgatgctagcgtaggagcgaatactaaggtcggaccgtttgcgcaattgagaccaggcgcgcaattaggtgcagatgttaaggttggaaattttgtagaaattaaaaaagcagatcttaaagatggtgccaaggtttcacatttaagttatattggcgatgctgtaattggcgaacgtactaatattggttgcggaacgattacagttaactatgatggtgaaaataaatttaaaactatcgtcggcaaagattcatttgtaggttgcaatgttaatttagtagcacctgtaacaattggtgatgatgtattggtggcagctggttccacaatcacagatgacgtaccaaatgacagtttagctgtggcaagagcaagacaaacaacaaaagaaggatataggaaataatcatttacgtatttaaaatggctaggataaaaggataatcctatgtaatattaatgtaatctttatgatttaatgattcgcatagtaatggagttacattttatatataatagtaattgcgtaagtaaataattggaggactataaatgttaaataatgaatataagaattcgtcattaaagattttttcattgaaaggaaacgaagcattagcgcaagaagttgctgaccaagtaggaattgaactaggtaaatgttcagttaaacgttttagtgatggagaaattcaaattaatatcgaagagagtattcgtggttgtgacgtatttattattcaaccaacatcatatcctgtgaatctacatttaatggaattattaattatgattgatgcttgtaaacgtgcttctgcagcaacaatcaatattgtagtgccatattatggatatgcaagacaagatagaaaagcccgtagccgtgagccaatcactgctaaattagttgcaaacttaatcgaaacagctggcgcaactcgtatgattgcgttagacttacatgcaccacaaattcaaggattctttgatattccaattgaccacttaatgggtgtgccaattcttgctaaacatttcaaagatgatccgaatattaacccagaagaatgtgtcgttgtttcaccagaccatggcggcgttacacgtgcacgtaaattagctgacattttaaaaactccaattgcaattatagataaacgtcgtcctagaccaaatgttgctgaagtgatgaacattgttggtgagattgaaggacgtacggcaattattattgacgatattattgatacagcaggtacaatcactttagctgcacaagcattaaaagataaaggtgctaaagaagtatatgcttgttgtacacaccctgttttatcaggaccggctaaagaacgtatcgaaaattctgctataaaagaattaatcgtaacaaactcaattcatttagatgaagatcgcaaaccatctaacactaaagaattatctgttgctggtttaatcgcacaagctatcattcgtgtatacgaaagagaatcagttagcgtattatttgactaatatttaaaaggcgtttgacgaacatattccaaacgtgtataatagtttcgttcgtgattatacgaataaataaacacttgcaagcaacgatgatgttgatgggtaagtgaggtgctcgttttgagcaaaaatgaaaggtggaaatgagaatggcttcattaaagtcaatcatccgtcaaggtaaacaaacacgttcagatcttaaacaattaagaaaatctggtaaagtaccagcagtagtatacggttacggtactaaaaacgtgtcagttaaagttgatgaagtagaattcatcaaagttatccgtgaagtaggtcgtaacggtgttatcgaattaggcgttggttctaaaactatcaaagttatggttgcagactaccaattcgatccacttaaaaaccaaattactcacattgacttcttagcaatcaatatgagtgaagaacgtactgttgaagtaccagttcaattagttggtgaagcagtaggcgctaaagaaggcggcgtagttgaacaaccattattcaacttagaagtaactgctactccagacaatattccagaagcaatcgaagtagacattactgaattaaacattaacgacagcttaactgttgctgatgttaaagtaactggcgacttcaaaatcgaaaacgattcagctgaatcagtagtaacagtagttgctccaactgaagaaccaactgaagaagaaatcgaagctatggaaggcgaacaacaaactgaagaaccagaagttgttggcgaaagcaaagaagacgaagaaaaaactgaagagtaattttaatctgttacattaaagtttttatactttgtttaacaagcactgtgcttattttaatataagcatggtgctttttgtgttattataaagcttaattaaactttattactttgtactaaagtttaattaattttagtgagtaaaagacattaaactcaacaatgatacatcataaaaattttaatgtactcgattttaaaatacatacttactaagctaaagaataatgataattgatggcaatggcggaaaatggatgttgtcattataataataaatgaaacaattatgttggaggtaaacacgcatgaaatgtattgtaggtctaggtaatataggtaaacgttttgaacttacaagacataatatcggctttgaagtcgttgattatattttagagaaaaataatttttcattagataaacaaaagtttaaaggtgcatatacaattgaacgaatgaacggcgataaagtgttatttatcgaaccaatgacaatgatgaatttgtcaggtgaagcagttgcaccgattatggattattacaatgttaatccagaagatttaattgtcttatatgatgatttagatttagaacaaggacaagttcgcttaagacaaaaaggaagtgcgggcggtcacaatggtatgaaatcaattattaaaatgcttggtacagaccaatttaaacgtattcgtattggtgtgggaagaccaacgaatggtatgacggtacctgattatgttttacaacgcttttcaaatgatgaaatggtaacgatggaaaaagttatcgaacacgcagcacgcgcaattgaaaagtttgttgaaacatcacgatttgaccatgttatgaatgaatttaatggtgaagtgaaataatgacaatattgacaacgcttataaaagaagataatcattttcaagaccttaatcaggtatttggacaagcaaacacactagtaactggtctttccccgtcagctaaagtgacgatgattgctgaaaaatatgcacaaagtaatcaacagttattattaattaccaataatttataccaagcagataaattagaaacagatttacttcaatttatagatgctgaagaattgtataagtatcctgtgcaagatattatgaccgaagagttttcaacacaaagccctcaactgatgagtgaacgtattagaactttaactgcgttagctcaaggtaagaaagggttatttatcgttcctttaaatggtttgaaaaagtggttaactcctgttgaaatgtggcaaaatcaccaaatgacattgcgtgttggtgaggatatcgatgtggaccaatttcttaacaaattagttaatatggggtacaaacgggaatccgtggtatcgcatattggtgaattctcattgcgaggaggtattatcgatatctttccgctaattggggaaccaatcagaattgagctatttgataccgaaattgattctattcgggattttgatgttgaaacgcagcgttccaaagataatgttgaagaagtcgatatcacaactgcaagtgattatatcattactgaagaagtgatcagccatcttaaagaagagttaaaaactgcatatgaaaatacaagacccaaaatagataaatcagtgcgcaatgatttgaaagaaacgtatgaaagctttaaattattcgaaagtacatactttgatcatcaaatactacgtcgcttagtagcgtttatgtatgaaacaccttcgacaattattgagtatttccaaaaagatgcaatcattgcagttgatgaatttaatcgtattaaagaaactgaagaaagtttaacagtagagtctgattcgtttattagcaatattattgaaagtggtaatggatttataggacaaagttttataaaatatgatgattttgaaacattgattgaaggctatcctgtcacttatttttcattattcgctacaacaatgccgataaaactaaatcatattattaaattttcatgtaaacctgtccaacaattttatgggcaatatgacattatgcgttctgaatttcaacgatatgttaatcaaaactatcatatcgtggttttggtcgaaaccgaaactaaagttgaacgtatgcaagcgatgttaagtgaaatgcatattccatcaataacaaaattgcatcgctcaatgtcatcggggcaagcagtgattattgaaggcagtttatctgaaggatttgaactacctgatatgggattagttgtcattactgagcgtgagctttttaaatcaaaacagaaaaagcaacgaaaacgtacgaaagctatctcaaatgctgaaaaaattaagtcttaccaagatttaaatgtgggagattatattgttcatgtgcatcatggtgttggtagatatttaggtgttgagacgctcgaagtggggcaaacgcatcgtgattatattaaattgcaatataaaggtacggatcaactatttgttccagtagatcaaatggatcaagttcaaaaatatgtagcttcggaagataagacgccaaaattaaataaactcggtggcagtgaatggaaaaaaacaaaagctaaagttcaacaaagtgttgaagatattgctgaagagttgattgatttatataaagaaagagaaatggcagaaggttatcaatatggggaagacacagctgagcaaacaacatttgaattagattttccatatgaacttacgcctgaccaagctaaatctatcgatgaaattaaagatgacatgcaaaaatcgcgtccaatggatcgcttgctatgtggtgatgttggttatggtaaaactgaagttgcagtgagagcagcattcaaagctgtaatggaaggaaagcaggttgcatttttagttcctacaactattttagctcagcaacattatgagacgttaattgagcgtatgcaagattttcctgttgaaattcaattaatgagtcgttttagaacgcctaaagagataaaacaaactaaggaaggacttaaaactggatttgttgacatagttgttggtacacacaaattacttagtaaagatatacagtataaagatttagggctgttgattgtagatgaagaacaacgatttggtgtacgccataaagagcgtattaaaacattaaaacataatgtagatgtactaacattgactgcaaccccaatacctagaacattgcatatgagtatgctaggtgtgcgggatttgtcagtgattgaaacgccgccagaaaatcgtttcccagttcaaacatatgtattagaacagaacatgagttttatcaaagaagctttagaaagagaactatcccgtgatggccaagtgttttatctttataataaagtgcaatccatttatgaaaaacgagaacaactccagatgttaatgccagatgctaacattgcagttgctcatggacaaatgacagagcgcgatttagaagaaacgatgttaagttttatcaataatgaatatgatattttagtaacgacgacgattattgaaacaggtgtcgatgtcccaaatgcaaatactttgatcattgaagatgcagatcgctttggattgagtcagttgtatcaattaagaggtcgtgttggtcgttcaagtcgtattggttatgcatacttcttacatccagcaaataaggtactaactgagactgcagaagatcgattacaagcgattaaagaatttacggagttaggctcaggatttaagattgcgatgcgtgatttgaacattcgtggtgctggtaatttgttaggtaaacaacagcacggctttattgatacagttggatttgatttgtacagtcaaatgttagaagaagctgtaaatgaaaaacgtggtattaaggaaccagaatctgaggtgccagaagtcgaagttgatttaaacttggatgcatatttgccaacagaatatattgcaaatgaacaagctaaaattgaaatttataaaaagctacgaaaaactgaaacatttgatcaaattatcgacattaaagatgaattaattgatcgtttcaatgattatcctgttgaagtagcacgtttgcttgatatagtggaaataaaagtacacgcattacattcaggtatcacgttgattaaagataaagggaaaataattgatattcatttatctgtaaaagccactgaaaatattgatggcgaagtgctgttcaaagcaacacaacctttaggtagaacaatgaaggttggtgttcaaaataatgcaatgacaattactttaacgaaacaaaatcaatggcttgatagtttgaagtttttagttaagtgcattgaagaaagtatgagaatcagtgatgaagcataaagaagcatttaatggcgttgtcgtgttaactgctgcattaattgtcattaaaattctgagtgctgtatatcgaattccatatcaaaatatattaggcgatacaggtttgtatgcatatcaacaagtgtatccaattgtagcattaggaatgatattatcgatgaatgccattcctagtgcaattacacaaaatatagggaagtatcatagtgacgaagcatatgcaaaagcagtcgcttatatacaattagttggtatattattatttattgctatttttgtgtttgcgaacaatattgcacatatgatgggtgatggccatttaacaccaatgattcaagctgcaagtttaagctttatatttataggtatgcttggcgtgttaagaggttattatcaatctgcaaataatatgacagttccggctatttcccaggttatagaacaagttatacgagtaggtattatcattgttactattgttatttttgtagacagaggttggacgatatatgaagcgggaacaattgctattttagcatcaacgataggttttttaggttcttcaatttatttagtagcgcaccgaccttttaagtttaaaatggtaaataacactgcaaagatcgtttggaaacagttcgcactttcggttttgattttcgctatcagtcaattaatcgtaattttatggcaagtgattgatagtgttactattattaagtcacttcaagcgatacgcgtgccattcgatgttgccataactgaaaaaggagtctatgaccgtggtgcatcatttattcagatgggattgattgtaactacaacatttagttttgcgctcattcctctgttaagtgacgcaatcaaaatgaataatcaggtacttatgaatcgttatgcaaatgcgtcattaaagattacgattttaataagtacagcagcgggaataggattaattaatttattgcctttaatgaacggtgtgttttttaagacgaatgatttaaccttaacgttaagtgtttatatgattacggtcatttgtgtatcgttaattatgatggatatggcattattacaagcgcaacatgctgtgagacctatttttgttggtatgacggcaggattggttattaaatttatacttaatatcattttgattcgtttaagtggcattattggtgcgagcattagtactgttgtatcattaattatattcggtacgattatccatattgctgtcacgagaaaataccacttatatgcgatgagacgattttttatcaatgttgttttaggtatggtatttatgtcgattgttgttcaatgcgtgttaaacatagtgacaacacacggtagaatcactggactcattgaattattatgtgcagcagtattaggtatcattgcattgtttttctatatttttagatttaatgttttgacatataaagagttaacttatttaccatttggttcaaagttgtatcaaattaagaaaggaagacgttgatggcacataccattacgattgttggcttaggaaactatggcattgatgatttgccgctagggatatataaatttttaaagacacaagataaagtttatgcaagaacgttagatcatccagttatagaatcattgcaagatgaattaacatttcagagttttgaccatgtttatgaagcacataaccaatttgaagatgtctatattgatattgtggcgcaattggttgaagctgctaatgaaaaagatattgtctatgcggttccgggtcatcctagagttgctgagacaactacagtgaaattactggctttagcaaaggacaatactgatatagatgtgaaagttttaggtgggaaaagctttattgatgatgtgtttgaagcagttaatgtagatccaaatgatggcttcacactgttagatgcgacatcattacaagaagtaacacttaatgttagaacgcatacattgattacgcaagtttatagtgcaatggttgctgctaatttgaaaatcactttaatggaacgatatcctgatgattaccctgttcaaattgtcactggtgcacgaagcgatggtgcggataacgttgtgacatgcccattatatgaattggatcatgatgaaaatgcattcaataatttgacgagtgtattcgtaccaaaaatcataacatcgacatatttgtatcatgactttgattttgcaacggaagtgattgatactttagttgatgaagataaaggttgtccatgggataaagtgcaaacgcatgaaacgctaaagcgttatttacttgaagaaacatttgaattgttcgaagctattgacaatgaagatgattggcatatgattgaagaactaggagatattttattacaagtgttattgcatactagtattggtaaaaaagaagggtatatcgacattaaagaagtgattacaagtcttaatgctaaaatgattcgtagacacccacacatatttggtgatgccaatgctgaaactatcgatgacttaaaagaaatttggtctaaggcgaaagatgctgaaggtaaacagccaagagttaaatttgaaaaagtatttgcagagcattttttaaatttatatgagaagacgaaggataagtcatttgatgaggccgcgttaaagcagtggctagaaaaaggggagagtaatacatgagattagataaatatttaaaagtatcacggttaataaagcgacgtacgctagcaaaagaagtaagtgatcaaggtagaattacaataaatggtaatgttgctaaagctggatcggatgttaaagttgaagatgtgctgacgattcgctttggtcaaaaattagtaacagttaaagtaactgcattaaatgaacatgcatctaaagataacgcgaagggtatgtatgaaatcattgaagagcgtcgacttgaagaagcgtaaattggaggtgacaagcaatgaaaaataaagtagaacatatagaaaatcagtacacgtcgcaagagaacaagaaaaaacaacgtcaaaaaatgaaaatgcgtgttgttcgtaggcgtattacagtatttgcgggcgtattacttgcgataattgttgttttatcaatcttgcttgttgtccaaaaacatcgcaatgatattgatgcacaggagcgaaaagcgaaagaagcacagtttcaaaagcaacaaaatgaagaaattgcgttaaaagaaaagttgaataatctgaatgacaaagattacattgaaaaaattgcgcgtgatgattattacttaagcaacaaaggtgaagtgatttttaggttgccagaagacaaagattcgtctagctcaaaatcttcgaaaaaataaatccaaattgattcaaaattatccgagtatagacattgtgaaaaaatccaaacaaggatataataagggaaaatcgaatcaaatcgggaggatttatttaacatatgtcaatcgaagttggaaataagcttaaaggtaaagtcactggtattaaaaagtttggtgcattcgtagaattacctgaaggaaaaagtggtttagttcacattagtgaagtcgcagataattatgttgaaaacgtagaagagcacctttctgttggtgatgaagtagacgtaaaagtattatctattgctgatgatggaaaaattagtctttcaattaagaaagctaaagaccgtccacgtagacaacatacgagtaaaccaagtcatcaaaaaccagtgcaaaaagccgaagattttgaaaagaaattaagcaatttcttaaaagatagtgaagataaattaacttcaatcaaacgtcaaacagaatctagacgcggtggcaaaggttcaagacgttaattaaaataaataaagactgtttcgataaggaatatatttagaatgatgcgtatcgaataatcgattgcagcgttagacaatctaagactgtttcttaaataaggagcagtctcttttatttgtaatgatataactaagacttataccatttttgaaaattgtaaaagtgaggtgatgttatgcagttaaatagtaatggttggcatgttgatgaccatattgttgtcgctgtttctacaggtattgatagtatgtgtttattgtatcaactactaaatgattataaagatagttatagaaaactaacatgcttacatgtcaatcatggcgttaggtcagcttcaattgaggaagccagatttttagaagcatactgcgaacgtcatcacatcgatttacatatcaaaaagttagatttgtcgcatagtctcgaccgaaataacagcattcagaatgaagctcgaattaaacgttacgaatggtttgatgaaatgatgaatgtattagaagcggatgtattgctaacggcgcatcatttggacgatcaattagaaactattatgtatcgtatttttaatgggaaatcaacacgtaataaactaggatttgatgagttatcgaagcgaaaaggttatcagatttatcgaccacttttagctgtctctaaaaaagaaataaaacaattccaagagagatatcatattccatattttgaagatgaatctaataaagataacaaatatgttagaaatgatattcgtaatagaattattccagctattgatgaaaataatcaacttaaagtatcgcatttattaaaattaaaacaatggcatgatgaacaatatgatattttgcaatattcagctaaacaatttattcaagaatttgtgaagtttgatgaacagtcaaaatatttagaggtttctagacaagcttttaataacttaccaaactcattaaagatggttgtgttggactgcctattatcaaagtattatgagttgtttaatattagtgctaaaacatacgaagagtggtttaaacaatttagtagtaagaaagcacaattcagtattaatctcacggataaatggataattcaaatcgcatatggtaaattaataataatggctaaaaataatggcgatacatattttagagttcaaacaattaaaaagccaggtaattatatttttaacaaatatcgattagagatacattctaatttaccaaaatgtttatttccgcttacagtgagaacacgacaaagtggcgatacatttaaactgaatgggcgcgatggttataagaaagtgaatcgcctgtttatagattgtaaagtgccacagtgggttcgggatcaaatgccaatcgtattggataaacaacagcgcattattgcggtaggagatttatatcaacaacaaacaataaaaaaatggattataattagtaaaaatggagatgaatagcgttatgcataatgatttgaaagaagtattgttaactgaagaagatattcaaaatatctgtaaggaattgggagcacaattaacaaaggattatcaaggtaaaccattagtatgcgtgggtatcttaaaaggctcagcaatgtttatgtcagatttaattaaacgaattgatacccatttatcaattgatttcatggatgtttctagttatcacggaggcactgagtcaactggtgaagttcaaatcattaaagatttaggttcttctattgaaaataaagacgtattaattattgaagatatcttagagactggtactacacttaagtcaattactgaattattacaatctagaaaagttaattcattagaaatagttactttattagataaaccaaaccgtcgtaaagcggacattgaagctaagtatgtaggtaaaaaaataccagatgaatttgttgttggttacggtttagattatcgtgaattataccgaaacttaccatatatcggtacgttaaaacctgaagtgtattcaaattaattttttaatcaatttcagttattattactatgcgtttgagaaataatagtgtagactcaaaaatatgaaaaatgtatttcatatatatttaattttagacaagacatatgtcttgaaaagttgaaaaatatagagattgataaaactaatacgggtgtgaatgacattgatgttaagctcaattactagcttataaaacatgtcatatgttacaatttttgttagttttattatgggaagtaggaggaaatgacgcatgcagaaagcttttcgcaatgtgctagttatcgtaataataggcgttattatttttggtctattttcatatttaaacggtaatggaaatatgccgaaacagcttacatataatcaatttactgagaagttggaaaaaggtgaccttaaaactttagaaatccaaccacaacaaaatgtctatatggtaagtggtaaaacgaaaaatgatgaagactattcatcaactattttatataacaacgaaaaagaattacaaaaaattactgatgctgctaaaaagcaaaacggtgtaaaattaacgattaaagaagaagaaaaacaaagtgtctttgtgagtatactttcaacattaattccagttgtagtcatagcgttattatttattttcttcctaagccaagcacaaggtggcggtagtggcggtcgtatgatgaactttggtaaatctaaagcaaaaatgtacgataataataaacgtcgtgttcgtttctctgatgtagcaggggcagatgaagaaaaacaagaattaattgaaattgttgatttcttgaaagataataaaaaattcaaagaaatgggatctaggattcctaaaggtgtcttacttgttggacctccaggtactggtaaaacattacttgctagagcggttgcaggtgaagctggcgcaccattcttctctattagtggttcagactttgtagagatgtttgttggtgttggtgcgagccgtgttcgtgacttattcgataatgctaagaaaaacgcgccttgtatcatctttatcgatgagattgatgctgttggtcgtcaacgtggtgcaggtgttggtggcggtcatgatgaacgtgaacaaaccctaaaccaattattagttgaaatggatggtttcggtgaaaatgaaggtatcattatgatagctgctacaaaccgtcctgatatccttgacccagccttattacgtccaggtcgttttgatagacaaattcaagttggtcgtccagatgtgaaaggccgtgaagcaattcttcatgttcatgctaaaaacaaaccacttgatgaaacggttgatttaaaagcaatttcacaacgtacacctggtttctcaggtgctgatttagagaacttattaaatgaagcatctttaattgctgtacgtgaaggtaaaaagaaaattgacatgagagatatcgaagaggcaacggatagagttatagccggacctgctaagaaatctcgagttatttctaagaaagaacgtaatattgttgctcatcacgaagctggtcatacaattatcggtatggtacttgatgaggcagaagtagtgcataaagttactattgttccacgtggacaagcaggtggttatgcaatgatgctacctaaacaagatcgtttcttaatgactgaacaagagttattagataaaatctgtggtttacttggtggacgtgtatcagaagatattaactttaacgaagtatcaacaggtgcttcaaatgacttcgaacgtgcaacacaaatcgcacgctcaatggttacgcaatatggtatgagtaaaaaattaggaccattacagttcggtcatagcaatggtcaagtattcttaggtaaagatatgcaaggtgagcctaattattcaagccaaatcgcatatgaaattgataaagaagttcaacgaatcgttaaagaacaatacgaacgttgtaaacaaattttattagagcacaaagaacaattaattttaattgctgaaacattattaacagaagaaacattagttgctgaacaaattcaatcattattctacgaaggtaaattacctgaaattgattatgatgcagctaaagttgttaaagatgaagattctgaatttaatgatggtaaattcggtaaatcttatgaagagattcgtaaagagcaattagaagatggacaacgtgacgaaagtgaagatcgtaaagaagaaaaagatattgctgaggataaaaaagaagctgataaatctgatgaaaaagatgaaccagcacatcgacaagccccaaatatcgaaaaaccttacgatccaaatcacccagacaataaataatcgattatattcagtacctctttctatgataaagttatagaaagaggtacttttatcgtttttgaaaatacgtattagattttaagtcgttgaattgttatagcagaaaataattgtaaaacaagttacttcattatttagaatgatgggtgtagaataagtacaattgttgcattttatgaagtaaagtaattttttaaatatagagtaatagaggagattgaaataatgacacacgattatattgttaaagcattagcatttgatggagagattagggcttatgctgctttgacaactgaaactgttcaagaagcacaaacgagacattatacatggccgacagcatctgctgcaatgggaagaacaatgacagcaacagctatgatgggcgcaatgttgaaaggtgatcaaaaattaactgtcactgtagatggccaaggacctattggacgaattattgccgatgcaaatgctaaaggcgaggtgcgtgcttatgtagaccatccacaaactcattttccattaaatgagcaaggtaaacttgatgtaagacgagcggtagggacaaatggatctattatggttgttaaagacgttggaatgaaagactatttctctggagcaagtccaattgtttcaggagaacttggtgaagattttacttattattatgctacaagtgaacaaacaccttcatcggtaggtcttggtgtattggtaaatcctgataatacgattaaagcagcaggaggatttatcattcaagttatgccaggtgccaaagatgaaacaatttcaaaattagaaaaagcaattagtgaaatgacaccagtttctaaattaattgaacaaggattaacgccagaaggattactaaacgaaatcttaggtgaagaccatgtgcaaattttagagaaaatgcctgttcaatttgaatgtaattgtagtcatgagaaatttttaaatgctattaaaggattgggcgaggctgagattcaaaatatgattaaagaagatcatggtgctgaagcagtatgtcatttctgtggaaataaatataaatatactgaagaagaattaaacgtgttgctagaaagtttagcgtaatttaatttaaatcaatacgctaaaatgtttatttttagcggtttagtgaaatgtagaactaaatagttgtataatccttagtgattttgtttgctttctagaatttatttgataaaataattctatatccgataaataaactaagatttcaacaactaactaaaaaggagtgttcttaatggcacaaaaaccagtagataatattactcaaattattggcggtacaccggtagtcaaattgagaaatgtagtagatgacaatgcagcagatgtttatgtaaaattggaatatcaaaatccaggtggttctgtaaaggatagaattgctttagcaatgattgaaaaagcagagcgagaaggcaaaattaaacctggcgatacaattgtagaaccaacaagtggtaatacaggtatcggtttagcatttgtatgtgctgctaaaggatataaagcagtatttactatgcccgaaacaatgagccaagagcgtcgtaatttattaaaagcatacggtgcggaattagttttaacgcctggatcagaagcgatgaaaggtgcaattaaaaaagctaaagaattgaaagaagaacatggttacttcgagccacaacaatttgaaaaccctgcgaaccctgaagttcatgagttaactacaggtcctgagttattacaacaatttgaagggaaaactatcgatgcgttcctagctggtgttggtactggtggtacgttatctggtgtaggtaaagttctgaaaaaagaatatcctaacatcgaaattgttgctatagagcctgaggcttctccagtattgagcggtggtgagccaggtccacataaattacaaggtttaggtgctggatttattccaggcactttgaatacagaaatctatgacagtattattaaagtaggaaatgatacagcgatggaaatgtctcgtcgagttgctaaagaggaaggtattttagcaggtatttcatcaggtgctgcgatttatgctgccattcaaaaagcaaaagaattaggaaaaggtaaaacagtagtaacagtattgccgagtaatggtgaacgctacttatcaacacctttatattcattcgatgactaattaatgtcatttaaaagagtgagttatctttttgagataacttgctctttttttctaccatgtatatttttaaaaatatgagcgttaaattaaacatttttctgataaaaatatccagtgaatgataagataataaacgtacatactaataactagtaaatagcaggagtaaattttattagagttaaacaatacataattaaagggtggttaacatgactaaaacaaaaattatgggcatattaaacgtcacacctgattcattctcagatggtggaaaatttaataatgttgaatcagctataaatagagtgaaagccatgatagatgaaggtgctgacattatagatgttggaggtgtttcaacgagacccggtcatgaaatggtttcattagaagaagagatgaacagagtattacctgttgttgaagctattgtcggttttgatgtaaaaatttcagtcgatacatttcgaagtgaggttgctgaagcatgtttaaaattaggcgttgatatgattaatgatcaatgggcgggtctgtatgatcatcgtatgttccaaattgtagctaaatatgacgcggaaattattttaatgcataatggaaatggtaatcgtgatgaaccggttgtcgaagaaatgttaacatctttgttagcacaagcacatcaagctaaaatagctggtataccttcaaataaaatttggctagatccaggtataggtttcgctaaaactagaaatgaagaagccgaagttatggcaagactggatgaacttgttgcaacagaatatccagttttattagcgacaagccggaaacgtttcactaaagagatgatgggttatgatacaacaccggttgaaagagatgaagtaactgcagctacgactgcatatggtattatgaaaggcgttagagcagtacgcgttcataatgtcgagttgaatgctaaattagctaaaggtatagattttttaaaggagaatgaaaatgcaagacacaatctttcttaaaggtatgcgcttttatggatatcatggtgctttatcagctgaaaatgaaatagggcaaattttcaaagtggatgtaactttgaaagtagacttagctgaagctgggcgtactgataatgttattgatacagttcattatggtgaagtgttcgaagaggttaaatcaattatggaaggtaaggccgttaatttacttgagcatctagctgaacgtattgcaaatcgtataaattcacaatataatcgtgtaatggaaacgaaagtgagaatcactaaagaaaacccaccgattccgggtcattatgatggagtaggtatcgaaatagtgagggagaataaatgattcaagcatacttaggattaggtagtaatattggtgatagagaaagccagttaaacgatgctataaagattttgaatgaatatgatggtattaacgtatctaatatttctccgatttatgaaacagcaccagttgggtatactgagcaacctaactttttaaatttgtgtgttgaaattcaaacaacactcacagtattacaactgttggaatgttgtttgaagacagaagaatgtttacaccgtattagaaaggaacgatggggtcctagaactttagatgtggatattttgttgtatggagaagaaatgatagatttaccaaaactgtcggtgccacatccgagaatgaatgaacgtgcatttgttttaatcccattaaatgatatagcagcaaatgtcgtagaaccacgttcgaaattgaaagtgaaagatttagtttttgtcgatgacagtgtaaagagatataaataatgtattgttgagaacattcatatttattgggaatagattattgattattggagatgtttccgcattttgattatctctaaatgcatttgatttcgaattagtatatgatgatttagtatgtgttagaattaagttatttcataaaatcaaagtaagcaatatttgataaattgctgtaatttatttaggcttttgttgaagtttgtggaagataatttttatacatttacttagggttgtattaatgataatcgtattttaaatgaataagtaattcataaacgaaaacagaaattgctttattacatttacaagctcttgtaaaattaaaaaagtgataaaattgatgttatgaatataagaaaacatgccacatcataactttaaggtgtaatggttaatgataaagtattagaaacatcgaaagagatgtatgttgagcaaaaatgtctgatattttataaaactttaaaggaaaatgtttgagtgtaccagttggaatactaaaggattacaacaagttaaaggagagaaagttatgtcagaagaaatgaatgaccaaatgttggttcgacgtcaaaaattacaagaattatatgatcttggtatagacccgtttggttctaaatttgaccgttcaggtttatctagtgatttgaaagaagagtgggaccagtattctaaagaagaattggtagaaaaagaagcggatagtcatgtcgctatagctggacgattaatgactaagcgtggtaaaggtaaagcaggatttgcacacgttcaggacttagctggacaaattcaaatttacgttcgtaaagatcaagttggcgatgacgaatttgatttatggaaaaatgctgatttaggcgatatcgttggtgttgaaggtgtaatgttcaaaacaaatactggcgaattatcggttaaagcgaagaaattcacgctactaactaaatcattgcgaccattaccggataaattccacggtttacaggatattgaacagagatatcgtcaaagatatttagatttaattacgaacgaagatagcactcgtacatttattaatcgtagtaaaatcattcaagaaatgcgtaattatttaaataataaaggtttcttggaagtagaaacacctatgatgcaccaaattgctggtggagcagctgctagaccatttgtaacacatcataatgcattagatgcaacgttatacatgcgtattgctattgagttgcatttaaaacgtttaattgtcggtggacttgaaaaagtatatgaaattggtagagtattccgtaatgaaggtgtatcaactagacataaccctgaattcacaatgattgaattatatgaagcatatgcagattatcatgacattatggatttaacagaatctatggtgagacatattgccaatgaagtgttaggttctgcaaaagtacaatacaatggggaaacgattgatttagaatctgcttggactcgtttgcatattgttgatgctgtaaaagaagctactggtgtagatttttatgaagttaaaagtgatgaagaagctaaagctttagctaaagaacatggtattgaaattaaagatacaatgaaatatggtcatattttaaatgaattctttgagcaaaaagttgaagaaacacttattcagccaacgtttatctatggtcatccgactgaaatttcacctttagcgaagaaaaatcctgaagatcctagatttactgatcgtttcgaattgttcattgtaggtagagagcatgcaaatgcatttactgaattaaatgatcctattgatcaaaaaggtcgttttgaagcgcaacttgttgaaaaagcgcaaggtaatgatgaagcgcatgaaatggatgaagattacattgaagcgttagaatatggtatgcctccgacaggtggtcttggtatcggtattgacagattggttatgttattaactgactctccatcaatcagagacgtattattattcccttatatgagacaaaaataaatgacgttgattgttagtaagagctctcgtgtatacaacatgtgtatgcgagggctttcttaattatggtaattagttcgtgtttgaatgtttttgatagtaatagttaacgatagtggtgctatttttgactgttaaacaaggtagttggctgatagatgaaaatgacgatacgtatatagagtagttcggatgagaaatgttaacgatagacattgagatatcttataacaaaaattgctatattagtataatttatcttaatcagctataaaagtactttaaaattgtatagaatgtgtatggttttgtacatatgtgtatgatagaatactaaaagtgttatgaattagagggcacgagaaatgtcagttttgaagaataaaaaagttgattaaaagtgttgactttatcaattgaatgaagtaatatataaaagtcgtcaaaaacagacgaaacacactaaaagctgatgtgacaaagtttacatcaaagtgtaaaattaactattgcaccttattaattaagcgtgtatcatgaataagtaagttattttgtctggtgactatagcaaggaggtcacacctgttcccatgccgaacacagaagttaagctccttagcgtcgatggtagtcgaacttacgttccgctagagtagaacgttgccaggcaaatgacaaatcggagaattagctcagctgggagagcatctgccttacaagcagagggtcggcggttcgaacccgtcattctccaccatttattcttagatatagccggcctagctcaattggtagagcaactgacttgtaatcagtaggttgggggttcaagtcctctggccggcaccatcttttgagccattagctcagctggtagagcatctgacttttaatcagagggtcagaggttcgaatcctctatggctcattacgatttaatttttatatttagcaaaataatgcagaagtagttcagcggtagaatacaaccttgccaaggttggggtcgcgggttcgaatcccgtcttctgctccattattttgccggggtggcggaactggcagacgcacaggacttaaaatcctgcggtgagagatcaccgtaccggttcgattccggtcctcggcaccattttagcgcccgtagctcaattggatagagcgtttgactacggatcaagaggttatgggttcgactcctatcgggcgcgccatttttaaattaattgaataacgggaagtagctcagcttggtagagcacttggtttgggaccaaggggtcgcaggttcgaatcctgtcttcccgattacttcttaaattccattttatgggggcttagctcagctgggagagcgcctgctttgcacgcaggaggtcagcggttcgatcccgctagtctccaccatttattttttacacgatgaacattgaaaactgaatgacaatatgtcaacgttaattccaaaaaacgtaactataagttacaaacattatttagtatttatgagctaatcaaacatcataatttttatggagagtttgatcctggctcaggatgaacgctggcggcgtgcctaatacatgcaagtcgagcgaacggacgagaagcttgcttctctgatgttagcggcggacgggtgagtaacacgtggataacctacctataagactgggataacttcgggaaaccggagctaataccggataatattttgaaccgcatggttcaaaagtgaaagacggtcttgctgtcacttatagatggatccgcgctgcattagctagttggtaaggtaacggcttaccaaggcaacgatgcatagccgacctgagagggtgatcggccacactggaactgagacacggtccagactcctacgggaggcagcagtagggaatcttccgcaatgggcgaaagcctgacggagcaacgccgcgtgagtgatgaaggtcttcggatcgtaaaactctgttattagggaagaacatatgtgtaagtaactgtgcacatcttgacggtacctaatcagaaagccacggctaactacgtgccagcagccgcggtaatacgtaggtggcaagcgttatccggaattattgggcgtaaagcgcgcgtaggcggttttttaagtctgatgtgaaagcccacggctcaaccgtggagggtcattggaaactggaaaacttgagtgcagaagaggaaagtggaattccatgtgtagcggtgaaatgcgcagagatatggaggaacaccagtggcgaaggcgactttctggtctgtaactgacgctgatgtgcgaaagcgtggggatcaaacaggattagataccctggtagtccacgccgtaaacgatgagtgctaagtgttagggggtttccgccccttagtgctgcagctaacgcattaagcactccgcctggggagtacgaccgcaaggttgaaactcaaaggaattgacggggacccgcacaagcggtggagcatgtggtttaattcgaagcaacgcgaagaaccttaccaaatcttgacatcctttgacaactctagagatagagccttccccttcgggggacaaagtgacaggtggtgcatggttgtcgtcagctcgtgtcgtgagatgttgggttaagtcccgcaacgagcgcaacccttaagcttagttgccatcattaagttgggcactctaagttgactgccggtgacaaaccggaggaaggtggggatgacgtcaaatcatcatgccccttatgatttgggctacacacgtgctacaatggacaatacaaagggcagcgaaaccgcgaggtcaagcaaatcccataaagttgttctcagttcggattgtagtctgcaactcgactacatgaagctggaatcgctagtaatcgtagatcagcatgctacggtgaatacgttcccgggtcttgtacacaccgcccgtcacaccacgagagtttgtaacacccgaagccggtggagtaaccttttaggagctagccgtcgaaggtgggacaaatgattggggtgaagtcgtaacaaggtagccgtatcggaaggtgcggctggatcacctcctttctaaggatatattcggaacatcttcttcagaagatgcggaataacgtgacatattgtattcagttttgaatgtttatttaacattcaaatattttttggttaaagtgatattgcttatgaaaataaagcagtatgcgagcgcttgactaaaaagaaattgtacattgaaaactagataagtaagtaaaatatagattttaccaagcaaaaccgagtgaataaagagttttaaataagcttgaattcataagaaataatcgctagtgttcgaaagaacactcacaagattaataacgcgtttaaatctttttataaaagaacgtaacttcatgttaacgtttgacttataaaaatggtggaaacatagattaagttattaagggcgcacggtggatgccttggcactagaagccgatgaaggacgttactaacgacgatatgctttggggagctgtaagtaagctttgatccagagatttccgaatggggaaacccagcatgagttatgtcatgttatcgatatgtgaatacatagcatatcagaaggcacacccggagaactgaaacatcttagtacccggaggaagagaaagaaaattcgattcccttagtagcggcgagcgaaatgggaagagcccaaaccaacaagcttgcttgttggggttgtaggacactctatacggagttacaaaggacgacattagacgaatcatctggaaagatgaatcaaagaaggtaataatcctgtagtcgaaaatgttgtctctcttgagtggatcctgagtacgacggagcacgtgaaattccgtcggaatctgggaggaccatctcctaaggctaaatactctctagtgaccgatagtgaaccagtaccgtgagggaaaggtgaaaagcaccccggaaggggagtgaaatagaacctgaaaccgtgtgcttacaagtagtcagagcccgttaatgggtgatggcgtgccttttgtagaatgaaccggcgagttacgatttgatgcaaggttaagcagtaaatgtggagccgtagcgaaagcgagtctgaatagggcgtttagtatttggtcgtagacccgaaaccaggtgatctacccttggtcaggttgaagttcaggtaacactgaatggaggaccgaaccgacttacgttgaaaagtgagcggatgaactgagggtagcggagaaattccaatcgaacctggagatagctggttctctccgaaatagctttagggctagcctcaagtgatgattattggaggtagagcactgtttggacgaggggcccctctcgggttaccgaattcagacaaactccgaatgccaattaatttaacttgggagtcagaacatgggtgataaggtccgtgttcgaaagggaaacagcccagaccaccagctaaggtcccaaaatatatgttaagtggaaaaggatgtggcgttgcccagacaactaggatgttggcttagaagcagccatcatttaaagagtgcgtaatagctcactagtcgagtgacactgcgccgaaaatgtaccggggctaaacatattaccgaagctgtggattgtcctttggacaatggtaggagagcgttctaagggcgttgaagcatgatcgtaaggacatgtggagcgcttagaagtgagaatgccggtgtgagtcgcgaaagacgggtgagaatcccgtccaccgattgactaaggtttccagaggaaggctcgtccgctctgggttagtcgggtcctaagctgaggccgacaggcgtaggcgatggataacaggttgatattcctgtaccacctataatcgttttaatcgatggggggacgcagtaggataggcgaagcgtgcgattggattgcacgtctaagcagtaaggctgagtattaggcaaatccggtactcgttaaggctgagctgtgatggggagaagacattgagtcttcgagtcgttgatttcacactgccgagaaaagcctctagatagaaaataggtgcccgtaccgcaaaccgacacaggtagtcaagatgagaattctaaggtgagcgagcgaactctcgttaaggaactcggcaaaatgaccccgtaacttcgggagaaggggtgctctttagggttaacgcccagaagagccgcagtgaataggcccaagcgactgtttatcaaaaacacaggtctctgctaaaccgtaaggtgatgtataggggctgacgcctgcccggtgctggaaggttaagaggagtggttagcttctgcgaagctacgaatcgaagccccagtaaacggcggccgtaactataacggtcctaaggtagcgaaattccttgtcgggtaagttccgacccgcacgaaaggcgtaacgatttgggcactgtctcaacgagagactcggtgaaatcatagtacctgtgaagatgcaggttacccgcgacaggacggaaagaccccgtggagctttactgtagcctgatattgaaattcggcacagcttgtacaggataggtaggagcctttgaaacgtgagcgctagcttacgtggaggcgctggtgggatactaccctagctgtgttggctttctaacccgcaccacttatcgtggtgggagacagtgtcaggcgggcagtttgactggggcggtcgcctcctaaaaggtaacggaggcgctcaaaggttccctcagaatggttggaaatcattcatagagtgtaaaggcataagggagcttgactgcgagacctacaagtcgagcagggtcgaaagacggacttagtgatccggtggttccgcatggaagggccatcgctcaacggataaaagctaccccggggataacaggcttatctcccccaagagttcacatcgacggggaggtttggcacctcgatgtcggctcatcgcatcctggggctgtagtcggtcccaagggttgggctgttcgcccattaaagcggtacgcgagctgggttcagaacgtcgtgagacagttcggtccctatccgtcgtgggcgtaggaaatttgagaggagctgtccttagtacgagaggaccgggatggacatacctctggtgtaccagttgtcgtgccaacggcatagctgggtagctatgtgtggacgggataagtgctgaaagcatctaagcatgaagcccccctcaagatgagatttcccaacttcggttataagatccctcaaagatgatgaggttaataggttcgaggtggaagcatggtgacatgtggagctgacgaatactaatcgatcgaagacttaatcaaaataaatgttttgcgaagcaaaatcacttttacttactatctagttttgaatgtataaattacattcatatgtctggtgactatagcaaggaggtcacacctgttcccatgccgaacacagaagttaagctccttagcgtcgatggtagtcgaacttacgttccgctagagtagaacgttgccaggcaaaaaatggatgcgatgagccgcattgagaccgcaaggtctcttttttttatgtctaaaacgtcaaaataaaaagcaaacacaaagaaaaatggcttggcgaagtgaaaacgtttgaatctgacgaaacgagaaaagaacgcaacgagtttagtagagctaaatgagtaagtgagagccgaaggagaggaaagaagcaagcgattgtcacaagtcaagaaaggttcttagcgaggatggtagccaacttacgttccgctagagtagaactggaaatgataatttaataatgtacactttcgattgtctaagtatgtacaactttaattttgtgtttatataaatttaaaatgatatcatcgaaaacaaaatattgtataaatagagaagagcagtaagacggtatctaattgaaaatgatcttactgctcttttatatactttattgaaatacaaaaaggaaattaattattatacaatagacaagctattgcataagtaacactaacttttatcaaagaagtgttactttataattaatgattttattagagcgtctacatgcggttttaaagcatcatcgtctataccgccaaagcctaatataaatttaggggttttcttatagtcttgatcatcatcaaaattataaacttgtaattttaactttactttgtttgctctatcaagacactcttgtaatgttaatccattttttactgtaattgtaaaatgcatacccgtttcagcaccttgaatatcaagctgctctttgtaaggtttcaatctttttaaaatataggttagttttctacgataaattcgtctcattttatttaaatgcctttcaaaaccaccggaagatataaacgttgcaataaggttttgcatatgaacaggtacagtgttgccttcaatgtgattttgagaatgatattttttcattatagaatagggtaacaccatatatgcaactcgacagctaggaaaaatagactttgaaaatgtactgatataaatcactttttctcctcttgaatatagaccttgaattgctggaatgggtttgccgaaatatctaaactcggaatcataatcatcttctataataaatcgttcttctttttcttgagcccattgtattaattgagttcgtttttttaagtccatcacatatccagttggaaattgatgggaaggcgttatatatactatatttttttgtgatttaataacttcatctacgtttattccattatcttcaacttcaatttgttcatattcaacttgttttttatctaaaatatttttgattggtggataactaggtttttcgataataaatgttgaagtataaagtaaatcgactaattgatttactaattgttcggtagatgagccaattataatttgattaggatcacaaattacgccacgattagtaaataaataaaatgccagttgaaaccgcaaatgtaattctccttgaaaatgtcctctacgtaattgatttaaatgatttgtatcataaagatctttggaatactttctgaaaagttctatagggaaatgtttcgtatctatttcatccaaattaaaagcataatcataagcttcatcactcgcttttggtttatatgaatcatcatcaaaaagagaggggataggttgattgtttaaaattgttaaagattcaatttcggacacaaaatatccagagcgaggtcttgaataaatgtaaccttcgtctaatagaagttgatatgcatgctctacggttgtttggctaatagataaatgtttgcttaattgtcttttagaataaaatttatcgccttctttaaattgaccttcaattatttgtttttttaatttttcataaagttgatggtataaagtgtttttcaattttataactgacctcctaaatttatcttattttgtacctttttaaatatcagtttatacattacaatgtatttaatcaacttgaaaaggggttttatgtataatgagtaaaattattggatcagacagagtcaaaagaggtatggctgaaatgcaaaaaggcggcgttattatggatgtcgttaatgctgagcaagcaagaattgcagaagaagctggcgcggtagcagttatggcattagaacgagtaccttctgatattagagctgctggtggtgttgcacgtatggcaaaccctaaaattgtagaagaagtaatgaatgctgtttctattccagtcatggctaaagcacgtattggtcatatcactgaagcaagagtattagaggcgatgggtgttgactatattgatgaatcagaagtgttaacaccagcagatgaggaatatcacttaagaaaagatcaatttacagtaccatttgtatgtggatgtcgtaatttaggtgaagctgcgcgtagaattggtgaaggtgctgctatgttacgtactaaaggtgaaccaggtacaggtaatattgttgaagctgtaagacatatgagacaagttaattcagaagttagtcgattgactgtaatgaatgatgatgagattatgacttttgcgaaagatatcggtgcgccttatgaaattttaaaacaaattaaagacaatggtcgtttaccggtagttaactttgcagctggtggcgttgcgactcctcaagatgctgctttaatgatggaattaggtgctgacggtgtattcgttggatcaggtatttttaaatcagaagatccagaaaaatttgctaaagcaattgttcaagcaacaacacattaccaagactatgaactaattggaagattagcaagtgaacttggcactgctatgaaaggtttagatatcaatcaattatcattagaagaacgtatgcaagagcgtggttggtaagatatgaaaataggtgtattagcattacaaggtgcagtacgtgaacatattagacatattgaattaagtggtcatgaaggtattgcagttaaaaaagttgaacaattagaagaaatcgagggcttaatattacctggtggcgagtctacaacgttacgtcgattaatgaatttatatggatttaaagaggctttacaaaattcaactttacctatgtttggtacatgcgcaggattaatagttctagcgcaagatatagttggtgaagaaggataccttaacaagttgaatattactgtacaacgaaactcattcggtagacaagttgacagctttgaaacagaattagatattaaaggtatcgctacagatattgaaggtgtctttataagagccccacatattgaaaaagtaggtcaaggcgtagatatcctatgtaaggttaatgagaaaattgtagctgttcagcaaggtaaatatttaggcgtatcattccatcctgaattaacagatgactatagagtaactgattactttattaatcatattgtaaaaaaagcatagcttaatgtatgctaaatcaacgaattattgatatttatagatttgttgagaagaaaatatctccttcaaacttagctttggaggagttattttttatgtcaaaattaaaaatgataaaaaataaagctatacataagaaaaaaacccttcaaagagactgagaatagtcaaaattttgaaggggttaattcgatgttgatgtatttgttaaataaagaatccagcgattgcagctgaaatgaaagatactagtgttgcaccgaataataatttcaaaccaaagcgggcaactgtatctccttttttgtcattaagtgatttaatcgcacctgaaataataccgatagagctaaagttagcaaatgatactaagaatacagatgtaacaccttttgcgtgttcagataaatcactaagtttaccaagtgcttgcattgctacaaattcgttagataatagttttgtcgccataactgaaccggcttgaactgcatcttgccatggcacaccgactaagaatgcaaatggtgcaaagacaaaaccaattaatgtttggaaatcccaagaaatagcgccacctgaaactgtactaaagatattgcttacaattccatttaatagagcgataatggcaatgtatccgattaacattgcgcctacaatgacagctactttaaatccatctaaaatatattctcctagcatttcgaagaatgattgttgtctttcttcagtttcttcaactaataatttgtcatcttcttcattaactttataagggttaataattgaagcgatgatgaaaccaccaaataagtttaagacaacagccgttacaacatatttaggttcaattaaggtaaagtatgcaccgataattgaagcagaaacagtcgacattgctgaagctgttaatgtgtataaacgttgcttaggtatgtatggtaattgttttttaattgaaataaatacttcagattgtcccaaaattgctgcagcaactgcattgtatgattctaaacgtcccataccattaattttagaaattaagaatcctaaaacattaatgattaaaggtaaaatctttgtgtattgaaggataccgataatcgctgaaataaatacgataggtaataatacactgaagaagaatggtggttgcttaggatcgatatattgaataccaccgaatacaaagttaacaccatctgctgcttttaataataagtagttaaaaccgtttgaaataccaccaataaccttgattcccattgtagttttaagcaagataaatgcaaagataagctgaattgcaagtaaaattcctacatatttccagcgaatatttttcctgtctgagctaaatagaaacgcaagtgctaaaaagaagataattccgataatcccaattagaatatgcatatatttctcattcctttagttttttctacaatctatcatacaataaaatggaagggctaacatcataaatttttgaaaatataaaaacaaattaattgaaaaaggtcaaaataggtcatataatatagtcaaagaaggtcaaaaaggggtgatatacatgcacaatatgtctgacatcatagaacaatacatcaaacgtttatttgaagagtcgaatgaagatgtcgttgaaattcagagagcgaatatcgcacagcgttttgattgcgtaccatcacaattaaattatgtaatcaaaacacgattcactaatgaacatggttatgaaatcgaaagtaaacgtggtggtggtggttacatccgaatcactaaaattgaaaataaagatgcaacaggttatattaatcatttgcttcagctgattggaccttctatttctcaacaacaagcttattatattattgatgggcttttagataaaatgttaataaatgaacgtgaagctaaaatgattcaagcagttattgatagagaaacgctatcaatggatatggtttctagagatattattagagcaaatattttaaaacgtttgttaccagttataaattattactaaatgaaatgaggtgttgaagtgctttgtgaaaattgtcaacttaatgaagcggaattaaaagttaaagttacaagtaaaaataaaacagaagaaaaaatggtgtgtcaaacttgtgctgaggggcaccatccgtggaatcaagctaatgaacaacctgaatatcaagaacatcaagataatttcgaagaagcatttgttgttaagcaaattttacaacatttagctacgaaacatggaattaattttcaagaagtagcgtttaaagaagaaaaacgttgcccatcatgtcatatgactttgaaagatattgcacatgttggtaaatttgggtgtgctaattgttatgcaacatttaaagatgacatcattgatatcgtccgcagagttcaaggtggacaatttgagcacgttggaaagacaccacattcttcacataaaaagatagctttaaagcgaaaaatcgaagaaaagaatgaatatttgaaaaaacttattgaaatccaagattttgaggaagcagccattgttagagatgaaattaaagcactaaaagctgagagtgaggtgcaacatgatgacgcataatattcatgataatatcagccaatggatgaaaagtaatgaagaaacaccaattgttatgtcttctagaattcggttagcgcgtaatttagaaaatcatgtgcatccactaatgtatgctactgaaaatgatggatttagagttataaatgaggtacaagatgccttgccaaactttgaattaatgcgtcttgatcaaatggatcaacaaagtaaaatgaaaatggttgcaaagcatttgattagtcctgaactaataaaacaaccagcagccgcagtattagtgaatgacgatgaatctttaagtgtcatgataaatgaagaggaccatattcgtattcaagctatgggaactgacacgacattacaggctttatataatcaagcttcatcaattgatgatgaattagatcgaagccttgatataagttatgatgaacaacttggttatttaactacatgtcctaccaatataggtactggtatgagagcaagcgtgatgctacatttgccaggtctatctattatgaaaagaatgacacggattgctcaaaccattaatcgttttggatatacaatcagaggtatttacggtgaaggttcgcaagtttatggacatacttatcaagtatccaaccaacttacacttggtaaatctgagttagaaatcatagaaacattaacagaagttgttaatcaaatcattcatgaagaaaaacaaatacgacaaaagttagacacttataatcaattagaaacacaagaccgtgtttttcgctcgctaggtattttacaaaactgtagaatgataactatggaagaggcttcttatagattaagcgaagttaaacttggtatagatttaaattacattgaattacaaaactttaaatttaatgaattgatggtagctatacagtcaccatttttattagatgaagaagatgacaaatctgtaaaagaaaaacgagcagatatactaagagaacatataaagtaggaggtcattatttatgttatttggtagattaactgagcgtgcacagcgcgtattagcacatgcccaagaagaagcaattcgtttaaatcattcaaatataggaacagaacacctattattggggttaatgaaagaacctgaaggaattgctgcaaaagtattagaaagttttaatatcactgaagataaagtaattgaagaagttgaaaaattaatcggacatggtcaagatcatgttggtacattgcattatacacctagagctaaaaaagtcattgaattatcgatggatgaagctagaaaattacatcacaattttgttggaacggaacatattttattaggcttgattcgtgaaaatgaaggtgttgcagcaagagtttttgcaaatctagatttaaatattactaaagcacgtgcacaagttgtgaaagctttaggaaaccctgaaatgagtaataaaaatgcacaagctagtaagtcaaataatactccaactttagatagtttagctcgtgacttaacagtcattgccaaagacggtacattagatcctgttataggacgtgataaagaaattacacgtgtaattgaagtattaagtagacgtacgaaaaacaatcctgtgcttattggagagccaggtgttggtaaaactgctattgctgaaggtttagcgcaagccatagtgaataatgaggtaccagagacattaaaagataagcgtgttatgtctttagatatgggaacagtagttgcaggtactaaatatcgtggtgaatttgaagagcgtctgaaaaaggttatggaagaaatccaacaagcaggtaatgtcatcctatttattgatgagttgcatactttagttggtgctggtggtgctgaaggtgctatcgatgcttcgaatattttgaagccggcattagcacgtggtgaattacaatgtattggtgctactacattagatgaatatcgcaaaaatattgaaaaagacgcggctttagaacgtcgtttccaacctgtacaagttgatgaaccttcagtagtagatacagttgctattttaaaaggattaagagatcgttacgaagcacaccatcgtattaatatttcagacgaagctattgaagcagctgttaaattaagtaacagatacgtttcagatcgtttcttaccagataaagcaattgatttaattgatgaagcaagttctaaagtaagacttaagagtcatacgacacctaataatttaaaagaaattgaacaagaaattgaaaaagttaaaaatgaaaaagatgccgcagtacatgctcaagagtttgaaaatgctgctaacctgcgtgataaacaaacaaaacttgaaaagcaatatgaagaagctaaaaatgaatggaagaatgcacaaaatggcatgtcaacttcattgtcagaagaagatattgctgaagttattgcaggatggacaggtatcccattaactaaaatcaatgaaacagaatctgaaaaacttcttagtctagaagatacattacatgagagagttattgggcaaaaagatgctgttaattcaatcagtaaagcggttagacgtgcccgtgcagggttaaaagatcctaaacgaccaattggtagctttatcttccttggaccaactggtgttggtaaaactgaattagctagagctttagctgaatcaatgtttggcgatgatgatgcgatgatccgtgtagacatgagtgaatttatggaaaaacacgcagtgagccgattagttggtgctcctccaggatatgttggtcatgatgatggtggacaattaactgaaaaagttagacgtaaaccatattctgtaattttatttgatgaaattgaaaaagctcatccagatgtatttaatattctattacaagttttagatgatggacatttgacagatacaaaaggacgtacagttgatttcagaaatacaattatcataatgacatcaaacgttggggcacaagaattacaagatcaacgatttgctggattcggtggttcaagtgatggacaagattatgaaacaattcgaaaaacgatgttaaaagaattaaaaaattcattccgtccagaatttttaaaccgtgtagatgatatcattgtattccataaactaacaaaagaagaattaaaagaaattgtaacaatgatggttaataaattaacaaatcgattatctgaacaaaacataaatattattgtaactgataaagcgaaagacaaaatcgcagaagaaggatatgatccagaatatggtgcaagaccattaattagagcgatacaaaaaactatcgaagataatttaagtgaattaatattagatggtaatcaaattgaaggtaagaaagttacagtagatcatgatggtaaagagtttaaatatgacattgctgaacaaacttcagaaactaaaacaccatcgcaagcataattataaaacagtccaaaacaaattaaagttttgggctgtttttttagtagcattgaactatagaaattcgtgaaagtatccatcaacgaaacaatctaataaaacaatcatcaaaggatagttaagaattatatgtaacaagttaatgagcctacagcgatagcataaaggtatgaatttttataaaggttttttgtttgaagatactagcaacttacgtcaaaataaaataggtctatataatattgtgataaatctagagaaaagagtttactaagaaattattaagattttatctttgaaagataccgactatcaacatgatgtaagtttattttataatattcataaaaaataaatctggtaaaacagtttgcgttagtagtcatgttaaaatacaaacaaatgtaactcacatttaatttgtcataatgggaatgtgcgtttaaaatagatttgttcaaaggaaagtggaggtgcaattttggccaagaaaaaagtgatttttgaatgtatggcttgtggttatcaatctcctaaatggatggggaaatgtcctaattgtggcgcttggaatcaaatggaggaaattgttgaaaaagcagccaatcctaaacatggagttaaaaccaaggaattagcaggtaaagtacaaaaattaaatagtattaaacatgaaacaacgccgagagtgttaacagattcagcagaattcaaccgtgtattaggtggaggtattgtgagcggatcgttagtacttattggtggggatccaggtattggtaagtcaacgttacttttacaaatttgtgcatcgttatctcaaaagaaaaaagtactatatattactggagaagaatcgcttagtcagactaaattacgtgcagagcgattagatgaagattcaagtgaattgcaagtattagctgaaacagatcttgaagttatttatcaaacagtaaaagaagaacaacctgatttattagtagtggattcgattcaaacaatatatcatcctgaaatcagctctgcgccaggttctgtttcacaagttcgtgaaagtacacaaagtttaatgaatattgctaaacaaatgaacattgcaacttttatagtgggtcatgtaacgaaagaaggtcaaattgctggcccaagattgctagaacacatggttgatactgtgctttattttgaaggcgatgaacaccacgcatatcgaattttgcgagctgttaaaaaccgttttggttcaacgaatgaaatgggaatcttcgaaatgaagcaaagtggattaaaaggtgtaaataatccatctgaaatgtttttagaagaacgttcaacaaatgttccaggttcaacaattgttgcaaccatggagggaaccagaccacttttaatagaagttcaagcgctggtaactccaacgacttttaacaatccgagacgaatggcaacagggattgatcataatcgattaagtttgttgatggctgttttggaaaagaaagaaaattatctattacaacaacaagatgcttatatcaaagtagctggcggtgtaaagttaacggagccagcagttgatttaagtgtaattgtagcaactgcatctagctttaaagataaagctgtcgacggattagattgctatattggagaagttggtttaacgggtgaggtacgtcgtgtatctcggatagaacaacgcgtgcaagaggctgcaaaactaggtttcaaacgtgtaattattcctaaaaataatataggcggatggacatatcctgaaggtatacaagtaataggtgtaactactgtacatgaagtattgtcatttgctcttcattcataaaacatcaagaaaggaggacattgtgtgaatatcgttaaactaatggttattattatttacttaattattgggagcgcattaggaataattattattcctgaaattgcaaatgatcttggattacaaaactccagctttttaaaaaatcactatgtagatggcattatcggtagtatttttatgttcttaatttttggtgtatttattagacgagttactaacgctataaaaggtttagaacattttattatgcgtagaagtgctgttgaaatactattcgcaacaataggtttaataatcggattacttatttctgttatggtgtcgtttatattagaatcaattggcaactctatttttaatcatttcattcctgtcataattacgatattactatgttatttcggtttccaatttggccttaaaaaacgagatgaaatgttaatgtttttacctgagaatatagcgcgttccatgtcacaacatactaaaagtgctacgccaaaaattatcgacacaagcgcaattattgatggtcgtattttagaagtcattcgttgcggttttatcgatggcaatattttaattccacaaggtgttattaatgaattacaaattgttgcagattcaaatgacagtgttaaacgtgaaaagggtaaaagaggcttagatattttaaatgaattgtatgatttagactatcctacaaaggttatacatccaactaaaacacatagtgatattgatacgatgttattaaaattagcaaaacaatatcatgcaagtattataacgacagatttcaacctaaataaagtttgtcatgtacatggtatcaaagcattaaatgttaatgatttatcagaagcaatcaaacctaatgtacatcaaggtgatcaactgcatattttactgacaaaaatgggtaaggagcctggtcaggcagtaggatatctagatgatggtacgatggtagttgttgataatgctaaaaatcttattggcagtcatgtcaatttagaagtagtcagcttattgcaaacatcttcaggaagaattgtttttgctaaaaaaatcgaagatacagtatcattataaaaactgtagttgacgaaaacaaaatagatattaaaaggtatatgaaatggcgaagtttgtaatttgaagtataactataaataaatgcaaaacatattagttatcaaaaaatacaaatagtgctaatatatcattgaaacaagttcattaagtgttaaattttagatattaataaagttattcttatagcaatcaagacatacaaaattagaatcaattttaacgtatttgaatagttaatttgaagtttaatttcacagtacataatattcatttttaagtcgttgaaatgtttatgtagtgcagtcttgattcttagggatagcttttttaaagtgttgaaaaaacaacagctttctatttaaaatttaagcatattacccagggaattatgttatgattaaacaatgaaattattttaaggtcatgttaaaaagcattgtttcgttttaacaataagacgagttagacatttgttatgacggtcgaagatagcaaatgaacaatttatatgaactaacttgaaaatctgatatttaatttaggagtgaaaaaaatgagcgatcgtataagagtaagatatgcaccaagtccaactgggtatcttcatattggtaatgcaagaacagcattattcaattacttgtatgctaaacattacaacggagattttgtgattcgaattgaagatactgataaaaaacgtaatttagaagatggagaaacatcacaatttgataatcttaaatggttaggattagattgggatgagtctgtagataaagacaatggctacggaccatatcgtcaatctgaacgtcaacatatctaccaaccattaatagatcagttactagcagaagataaagcatataaatgctatatgacagaagaagaattagaagctgaacgtgaagcgcaaatcgctcgtggtgaaatgcctcgctatggtggtcaacatgcgcatttgactgaagaacaacgtcaacaatttgaagcagaaggacgccaaccatcaattcgtttccgagtacctcaaaaccaaacgtattcatttgatgatatggtaaaaggaaatatttcatttgattcaaatggtattggtgactgggttatcgtaaaaaaagatggcattccaacgtacaattttgcagtagctatagatgatcattacatgcaaatttcagatgtaattcgtggtgatgatcatatttcaaacacgcctaaacaaattatgatttatgaagcatttggctgggagccacctcgttttggtcatatgtcattaattgttaatgaagaacgtaaaaagttaagtaaacgtgatgggcaaattttacaatttattgagcaatatcgtgacttaggttatttacctgaagcgttatttaattttattgcgttattaggttggtctcctgaaggtgaagaagaaatcttttctaaagaagaatttatcaaaatctttgatgaaaagcgtttgtcaaaatcaccagcatttttcgataagcaaaaattagcatgggttaataaccaatatatgaaacaaaaagatactgaaacagtattccaattagcattacctcatttaattaaagcaaatttgattcctgaggtgccgtcagaagaggatttatcttggggacgcaaattaattgcgctttatcaaaaagaaatgagttatgccggtgaaattgtacctttatcagaaatgttctttaaagaaatgccagctcttggtgaagaagaacaacaagtgattaatggagagcaagtaccagagttaatgacgcacttattcagtaaattagaagcacttgaaccatttgaagcggctgaaattaaaaagacaattaaagaagttcaaaaagaaacaggaataaaaggcaagcaattatttatgcctattcgtgttgctgtaacaggccaaatgcatggtcctgaattaccaaatacaattgaagtacttggtaaagaaaaagtgctaaaccgtttaaaacaatataagtaatgaaatagacaagatcaaggtagtatatacttgaattttataacgtaaccacatatgataaagttgtattaacaaattacaacaatatgaataaagtattttatataaaacgaaggattagtaattaaatttatacgatgcagagagtgtacggttgctgtgagtacaacgtagaaattaatgaatgcaccttcgtaaaatgaattaaatatataatgagagtgatgagcattaagttgacttagtttccttgataatttggaagcgcccgcaatattattaatgttattcgctaaattcagagtggaaccgtgcggaagcgcctctaacaatacaatttgtatgttagtggtgcttttttgatatttaatttcgcaggtacttcaattatgtatttacgtagttcaatcattgaggaggaaatgatcttgttaaaaagaatgagagacgatataaaaatggtatttgagcaggatccagcggcacgttcaacattagaagtcattacaacgtatgcaggtttacatgcagtttggagtcatttgattgcacataagttatacaaccaaaaaaaatatgttgcagcacgcgcgatatctcaaatttcaagatttttcacaggtatagaaatccatccaggtgctaaaattggaaagcgtctatttatagatcatggtatgggcgttgtaataggagaaacatgtacaattggtgataatgtgacaatctatcaaggcgtgacacttggtgggacagggaaagaaagagggaaaagacacccagatataggagacaatgttttaatagcagccggtgcgaaagttttaggaaatattaaaataaattcaaatgtaaatattggtgcaaattcagttgttttacaatcagttccaagttattcaacggttgttggtataccaggacatattgttaagcaagatggtgttcgagttggaaaaacatttgatcatcgccatctacctgatccaatttatgaacaaattaagcatttagaacgacaacttgaaaagactaggaatggagagattcaagatgattacattatataatacgcttacacgtcaaaaagaagtgttcaagcctatagaaccagggaaagtaaaaatgtatgtatgtggtcctactgtatataactacattcatattggtaacgcaagaccagcaattaattatgacgtagtgagacgttactttgaataccaaggatataatgtagaatatgtatcaaattttacagacgtagatgataaattaattaaacgttctcaagaattaaatcagtctgttcccgaaattgcagaaaaatatatcgctgcttttcatgaagatgttggtgcgttaaatgttagaaaagcgacttcaaatccaagggtaatggaccatatggatgacattattcaatttattaaagatttggtggatcaaggttatgcatatgaaagtggtggcgatgtttactttagaacacgtaaatttgaaggttatggtaaattaagtcatcaatccatagatgacttaaaagtgggtgctcgtatagatgcaggagagcataaagaagatgcacttgattttacattgtggaaaaaagcgaagcctggcgagattagttgggatagcccatttggtgaaggtagaccaggatggcatatagaatgttctgtaatggcatttcatgagctaggacctacaattgatatacatgcgggtggttcagatttacaatttccacatcatgaaaatgaaatagcacaatcagaagcacataatcatgcgccatttgctaattattggatgcataatggtttcattaatattgataatgaaaaaatgagtaaatcactaggcaactttattttagttcacgatattattaaagaagttgatccagatgtactaagattctttatgattagcgtacattatagaagcccaattaactataatctagaattggtagaatcagcacgtagtggactagagcgtattcgcaatagttatcaattaattgaagagcgcgcacaaattgctactaatattgaaaatcaacagacatatattgatcaaattgatgcgattttaaatcgttttgaaacagttatgaatgatgattttaatacagctaatgcaattacagcttggtatgatttagcaaaacttgcgaataaatatgtactagagaacacaacatcaacagaagtaattgataaatttaaagcagtttatcaaattttcagcgatgttttaggtgtaccgttaaaatctaaaaatgcagatgaattattggatgaagatgttgaaaaattaatcgaagagcgtaatgaagcaaggaaaaacaaagattttgcacgagcagatgaaattcgagacatgctgaaatcacaaaacattatattagaagacacacctcaaggggttagatttaaacgtggataatcaacaagataatcacattaaattattgaatccattgaccttagcatatatgggagacgcagtcttagatcaatatgtacgtacctatatcgttttaaagcttaaaagtaagcctaataaactacatcaaatgtctaaaaaatatgtatctgccaaaagtcaggcgcaaacgttagaatatttaatggagcaagaatggtttacagacgaagaaatggatattttgaagcgagggcgtaacgcgaaaagtcatactaaagctaaaaacactgatgttcaaacatatcgtaaaagttcagcgatagaagcagtgataggttttctttatttagaaaaaagagaagaacgattagaggcattattaaataaaataataacaatagtaaacgaaaggtagtgacgatgtggaagatacggttattgttggtaggcatgctgttagagaagcgattattactgggcatccgataaataagatattgattcaagaaggtattaaaaagcaacaaattaatgaaattttaaaaaatgcaaaagatcaaaaaatcattgttcaaactgtaccaaaatctaaattagattttttagcaaatgcaccacatcagggtgttgcagcgcttattgcaccatatgaatatgctgacttcgatcaatttttaaaacagcaaaaagaaaaagaaggtttattgacagtacttatattagacggcttagaagacccacataacttgggatcaattttaagaacagccgatgcaacgggagttgatggtgttattattcctaaacgtcgttcagttacactaacgcaaacagttgcaaaagcctcaacaggtgcaattgaacatgtaccagttattcgagtgacaaatttagctaaaactatcgatgaactaaaagataatggcttttgggtagctggcactgaagctaataatgcaacagattatagaaatctagaagcggacatgtcattggctattgtaattggtagcgaaggacagggtatgagtcgcctagtaagtgataaatgcgatttttatattaagattccaatggttggacatgtaaacagtttgaatgcttcggttgcagcaagtttaatgatgtacgaagtatttcgaaaaagacatgatgttggagaaatataatgaaagaacgttacttaatcattgatggatacaatatgataggacaatcaccaacgctaagcgccattgcaaaagagaatttagaagaagctagaatgcaattaatagatgcaattgcaaattataatgcagttatttcagatgaaattatttgtgttttcgatgcttatgaccaatcgggtgttgaaagagaatacatgtatcatggcgttaaaacgatttttaccaaggaaaaagaaacagctgatagtttcatagaacgttatgtttatgaactttatgacaagcatactaagcatattacagttgtaacaagtgatatgagtgagcaacatgctatctttggatcaggtgcatatagaatatcatctcgcgaaatgtggagagatttaaaagaaaatgaaattgatgtgagtaaatcattagatgatataagtgaaaacaagccaagaactcgaattccgttatcttctgaaatccttgcagaatttgaaaaaatacgaagaggacatcataagaaatgacatttccgtcatcttgaaattttgaatgtaacaatattaaactaaccttaaattttagatagaaggggttagtttaatatttgaaatacgatttgacaactcaagacagtacaatcaaacgtaacaatgcaataaatgataaagacttcgaaaagttagtaatggatctacaaccattaattattcgacgcatcaaaacatttggatttaatcattatgatttagaagacttatatcaagaaatacttatacggatgtataggtcggtccaaacatttgattttagtggagagcagcctttcacaaattatgttcaatgtttaattacgtctgtaaagtatgattatttgagaaaatatttagctacaaataaaagaatggataatttgattaatgaatatagagttacgtatccatgtgcaataaagcgttttgatgttgaaaacaattatttgaataaattagcaattaaagagttgatttgtcagtttaagtatttgagtgcatttgaaaaagatgtcatgtatttaatgtgtgaacaatataagccgagagaaattgctcaattgatgcatgtaaaagagaaagtgatttataatgccatacaacgatgtaaaaataaaataaaacgttatttcaaaatgatttgaaaagcgccttaggacgtgaattgaattataacgtgttacttactgatggtttgacatttgttataaattttatgtatagtatactggtattataatgaataaaggtgaattattgtgagaaaaatacctttaaattgtgaagcttgtggcaatagaaattataatgttcctaagcaagaaggctcggcaacaagattaaccttaaagaaatattgtccaaaatgtaacgcgcacacaattcataaagaatcgaaataaatacattcgaaataatactttgataatatgttcaaaggatttggaggttgagcagatggctaaaaaagaaagtttctttaaaggcgttaagtctgaaatggaaaaaacaagttggccgacgaaagaagagctatttaaatatactgtaattgtagtttctactgttatattcttcttagtctttttctatgccttagatttaggaattacagcattgaaaaatttattatttggttagaggagtgaagacatgtctgaagaagttggcgcaaagcgttggtatgcagtgcatacatattctggatatgaaaataaagttaaaaagaatttagaaaaaagagtagaatctatgaatatgactgaacaaatctttagagtagtcataccggaagaagaagaaactcaagtaaaagatggcaaagctaaaacgactgttaaaaaaacattccctggatatgttttagtggaattaatcatgacagatgaatcatggtatgtggtaagaaatacaccaggcgttactggttttgtaggttctgcaggtgcagggtctaagccaaatccattgttaccagaagaagttcgcttcatcttaaaacaaatgggtcttaaagaaaagactatcgatgttgaactcgaagttggcgagcaagttcgtattaaatcaggtccatttgcgaatcaagttggtgaagttcaagaaattgaaacagataagtttaagctaacagtattagtagatatgtttggccgagaaacaccagtagaagttgaattcgatcaaatagaaaagctttaattaacaattaaagttattaaactaaccaaaagataaaaaagagtattgattttttaattagaaaagtgttaaaattatgtggtcgcgcttttagagcgcccatttcgtcacgaaatgttaagagtgggagggcaaaactgagccctgtgaccacatcacgatatcaaggaggtgcacatcgtggctaaaaaagtagataaagttgttaaattacaaattcctgcaggtaaagcgaatccagcaccaccagttggtccagcattaggtcaagcaggtgtgaacatcatgggattctgtaaagagttcaatgcacgtactcaagatcaagcaggtttaattattccggtagaaatcagtgtttatgaagatcgttcatttacatttattacaaaaactccaccggctccagtattacttaaaaaagcagctggtattgaaaaaggttcaggcgaaccaaacaaaactaaagttgctacagtaactaaagatcaagtacgcgaaattgctaacagcaaaatgcaagacttaaacgctgctgacgaagaagcagctatgcgtattatcgaaggtactgcacgtagtatgggtatcgttgtagaataattttacgaatattaaatttgattacatgatttaaacgatgaagcagataacagagataataatgatgaattataaatataatctgaatgactagattaatgattgatttattcataagattaattcttctgttgtctgctcttaacttgcatatagcaagtaatgtgggaggaaattccgctaaaaccactaaaggaggaactataaatggctaaaaaaggtaaaaagtatcaagaagcagctagtaaagttgaccgtactcagcactacagtgttgaagaagcaattaaattagctaaagaaacaagcattgctaactttgacgcttctgttgaagttgcattccgtttaggaattgatacacgtaaaaatgaccaacaaatccgtggtgcagttgtattaccaaacggaactggtaaatcacaaagtgtattagtattcgctaaaggtgacaaaattgctgaagctgaagcagcaggtgctgactatgtaggtgaagcagaatacgttcaaaaaatccaacaaggttggttcgacttcgatgtagtagttgctacaccagacatgatgggtgaagttggtaaattaggtcgtgtattaggaccaaaaggtttaatgccaaaccctaaaactggaactgtaacaatggatgttaaaaaagctgttgaagaaatcaaagctggtaaagtagaatatcgtgctgaaaaagctggtatcgtacatgcatcaattggtaaagtttcatttactgatgaacaattaattgaaaacttcaatactttacaagatgtattagctaaagctaaaccatcatctgctaaaggtacatacttcaaatctgttgctgtaactacaacaatgggtcctggagttaaaattgatactgcaagtttcaaataataaatgatataaacaattacaggctgaaagaaatatctttcagtctgtaaaaatatattgacaataagtaatttccaagttatattacttattgtgattattttacctaagacagtaggagttatttataacttaaaatttatcctgccgaggctaaaattgacttgaacgtgatgatctatgatctttcaagcactttttgccgtgggtagaaagtgctttttttattaattttaaaaaaagcaccaaaaatttaaatggaggtgtctgaatgtctgctatcattgaagctaaaaaacaactagttgatgaaattgctgaggtactatcaaattcagtttcaacagtaatcgttgactaccgtggattaacagtagctgaagttactgacttacgttcacaattacgtgaagctggtgttgagtataaagtatacaaaaacactatggtacgtcgtgcagctgaaaaagctggtatcgaaggcttagatgaattcttaacaggtcctactgctattgcaacttcaagtgaagatgctgtagctgcagcgaaagtaatttctggatttgctaaagatcatgaagcattagaaattaaatcaggcgttatggaaggcaatgttattacagcagaagaagttaaaactgttggttcattaccttcacacgatggtcttgtatctatgcttttatcagtattacaagctcctgtacgcaacttcgcttatgcggttaaagctattggagaacaaaaagaagaaaacgctgaataatttttagcgtaaaaaaattaaaaataatggaggaattataaaatggctaatcatgaacaaatcattgaagcgattaaagaaatgtcagtattagaattaaacgacttagtaaaagcaattgaagaagaatttggtgtaactgcagctgctccagtagcagtagcaggtgcagctggtggcgctgacgctgcagcagaaaaaactgaatttgacgttgagttaacttcagctggttcatctaaaatcaaagttgttaaagctgttaaagaagcaactggtttaggattaaaagatgctaaagaattagtagacggagctcctaaagtaatcaaagaagctttacctaaagaagaagctgaaaaacttaaagaacaattagaagaagttggagctactgtagaattaaaataattcaagtatcttaaacttaataatcaaagttttatagcaagtattgctataatataatgattctttgagaagttaaaaccccgttattttgataacggggttttattcatttaaagactgagtgaaatgttataattataatgacgagttacaaagtgaagatgaggtggaataatgagtcattattacgatgaagatccaagtgtaattagcaatgaacaacgtattcaatatcaattaaaccatcataaaattgatttaataactgataacggagtgttttcgaaagataaagtagattatggttcagatgttcttgttcaaacttttttaaaagcgcatccacctggtccaagtaagcgaattgccgatgttggttgtggttacggaccaattggtttgatgattgctaaagtatcaccacatcattcaattacaatgctagatgttaatcacagagcgctagccttagttgaaaaaaacaaaaaattaaatggtattgataatgtgatcgtaaaggaaagtgatgctttgtctgctgtggaagacaaaagttttgattttattttaaccaatccaccaataagagcagggaaagaaaccgtgcatcgtatattcgagcaagcattacatagattagactcgaacggtgaactattcgttgtaattcagaagaagcaaggtatgccatctgcaaagaaaagaatgaatgaactttttggaaatgtagaagtggtaaataaagataaaggatattacattctgagaagtataaaagcttgaaatgaaatggatattctgttatagttatataatgtaaaaatttatgttcaataagtgtgtacttttacgttaaatagataagttaattaagaataaatatagaatcgaaaatggtgtcatcattagtgttgccgttttctttttgtctttttattaatatgcttatggtatttagctaaaagcggatcacataatttttgaggggtgaatctgtttggcaggtcaagttgtccaatatggaagacatcgtaaacgtagaaactacgcgagaatttcagaagtattagaattaccaaacttaatagaaattcaaactaaatcttacgagtggttcctaagagaaggtttaatcgaaatgtttagagacatttctccaattgaagattttactggtaatttgtcattagagtttgtggattaccgtttaggagaaccaaaatatgatttagaagaatctaaaaaccgtgacgctacttatgctgcacctcttcgtgtaaaagtgcgtctaatcattaaagaaacaggagaagttaaagaacaagaagtctttatgggtgatttcccattaatgactgatacaggtacgttcgttatcaatggtgcagaacgtgtaatcgtatctcaattagttcgttcaccatccgtttatttcaatgaaaaaatcgacaaaaatggtcgtgaaaactatgatgcaacaattattccaaaccgtggtgcatggttagaatatgaaacagatgctaaagatgttgtatacgtacgtattgatagaacacgtaaactaccattaacagtattgttacgtgcattaggtttctcaagcgaccaagaaattgttgaccttttaggtgacaatgaatatttacgtaatactttagagaaagacggcactgaaaacactgaacaagcgttattagaaatctatgaacgtttacgtccaggtgaaccaccaactgttgaaaatgctaaaagtctattgtattcacgtttctttgatccaaaacgctatgacttagcaagcgtgggtcgttataaaacaaacaaaaaattacatttaaaacatcgtttatttaatcaaaaattagctgagccaattgtaaatactgaaactggtgaaattgtagttgaagaaggtacagtgcttgatcgtcgtaaaatcgacgaaatcatggatgtacttgaatcaaatgcaaacagcgaagtgtttgaattgcatggtagcgttatagacgagccagtagaaattcaatcaattaaagtatatgttcctaacgatgatgaaggtcgtacgacaactgtaattggtaatgctttccctgactcagaagttaaatgcattacaccagcagatatcattgcttcaatgagttacttctttaacttattaagcggtattggatatacagatgatattgaccatttaggtaaccgtcgtttacgttctgtaggtgaattactacaaaaccaattccgtatcggtttatcaagaatggaaagagttgtacgtgaaagaatgtcaattcaagatactgagtctatcacacctcaacaattaattaatattcgacctgttattgcatctattaaagaattctttggtagctctcaattatcacaattcatggaccaagcaaacccattagctgagttaacgcataaacgtcgtctatcagcattaggacctggtggtttaacacgtgaacgtgctcaaatggaagtacgtgacgttcactactctcactatggccgtatgtgtccaattgaaacacctgagggaccaaacattggattgattaactcattatcaagttatgcacgtgtaaatgaattcggctttattgaaacaccatatcgtaaagttgatttagatacacatgctatcactgatcaaattgactatttaacagctgacgaagaagatagctatgttgtagcacaagcaaactctaaattagatgaaaatggtcgtttcatggatgatgaagttgtatgtcgtttccgtggtaacaatacagttatggctaaagaaaaaatggattatatggatgtatcgccgaagcaagttgtttcagcagcgacagcatgtattccattcttagaaaatgatgactcaaaccgtgcattgatgggtgcgaacatgcaacgtcaagcagtgcctttgatgaatccagaagcaccatttgttggtacaggtatggaacacgttgcagcacgtgattctggtgcggctattacagctaagcacagaggtcgtgttgaacatgttgaatctaatgaaattcttgttcgtcgtctagttgaagagaacggcgttgagcatgaaggtgaattagatcgctatccattagctaaatttaaacgttcaaactcaggtacatgttacaaccaacgtccaatcgttgcagttggagatgttgttgagtataacgagattttagcagatggaccatctatggaattaggagaaatggcattaggtagaaacgtagtagttggtttcatgacttgggacggttacaactatgaggatgccgttatcatgagtgaaagacttgtgaaagatgacgtgtatacttctattcatattgaagagtatgaatcagaagcacgtgatactaagttaggacctgaagaaatcacaagagatattcctaatgtttctgaaagtgcacttaagaacttagacgatcgtggtatcgtttatattggtgcagaagtaaaagatggagatattttagttggtaaagtaacgcctaaaggtgtaactgagttaactgccgaagaaagattgttacatgcaatctttggtgaaaaagcacgtgaagttagagatacttcattacgtgtacctcacggcgctggcggtatcgttcttgatgtaaaagtattcaatcgtgaagaaggcgacgatacattatcacctggtgtaaaccaattagtacgtgtatatatcgttcaaaaacgtaaaattcatgttggtgataagatgtgtggtcgacatggtaacaaaggtgtcatttctaagattgttcctgaagaagatatgccttacttaccagatggacgtccgatcgatatcatgttaaatcctcttggtgtaccatctcgtatgaacatcggacaagtattagagctacacttaggtatggctgctaaaaatcttggtattcacgttgcatcaccagtatttgacggtgcaaacgatgacgatgtatggtcaacaattgaagaagctggtatggctcgtgatggtaaaactgtactttatgatggacgtacaggtgaaccattcgataaccgtatttcagtaggtgtaatgtacatgttgaaacttgcgcacatggttgatgataaattacatgcgcgttcaacaggaccatattcacttgttacacaacaaccacttggcggtaaagcgcaattcggtggacaacgttttggtgagatggaggtatgggcacttgaagcatatggtgctgcatacacattacaagaaatcttaacttacaaatccgatgatacagtaggacgtgtgaaaacatacgaggctattgttaaaggtgaaaacatctctagaccaagtgttccagaatcattccgagtattgatgaaagaattacaaagtttaggtttagatgtaaaagttatggatgagcaagataatgaaatcgaaatgacagacgttgatgacgatgatgttgtagaacgcaaagtagatttacaacaaaatgatgctcctgaaacacaaaaagaagttactgattaatacgcaatttacaaaacaggcaaaaagatactaagctgaattttattgatgattcagtttagtactttaagccattttaaataaatgcaaatcaatcaaatagcacagctaatctaaattgaaggaggtaggctccttgattgatgtaaataatttccattatatgaaaataggattggcttcacctgaaaaaatccgttcttggtcttttggtgaagttaaaaaacctgaaacaatcaactaccgtacattaaaacctgaaaaagatggtctattctgtgaaagaattttcggacctacaaaagactgggaatgtagttgtggtaaatacaaacgtgttcgctacaaaggcatggtctgtgacagatgtggagttgaagtaactaaatctaaagtacgtcgtgaaagaatgggtcacattgaacttgctgctccagtttctcacatttggtatttcaaaggtataccaagtcgtatgggattattacttgacatgtcaccaagagcattagaagaagttatttactttgcttcttatgttgttgtagatccaggtccaactggtttagaaaagaaaactttattatctgaagctgaattcagagattattatgataaatacccaggtcaattcgttgcaaaaatgggtgcagaaggtattaaagatttacttgaagagattgatcttgacgaagaacttaaattgttacgcgatgagttggaatcagctactggtcaaagacttactcgtgcaattaaacgtttagaagttgttgaatcattccgtaattcaggtaacaaaccttcatggatgattttagatgtacttccaatcatcccaccagaaattcgtccaatggttcaattagatggtggacgatttgcaacaagtgacttaaacgacttataccgtcgtgtaattaatcgaaataatcgtttgaaacgtttattagatttaggtgcacctggtatcatcgttcaaaacgaaaaacgtatgttacaagaagccgttgacgctttaattgataatggtcgtcgtggtcgtccagttactggcccaggtaaccgtccattaaaatctttatctcatatgttaaaaggtaaacaaggtcgtttccgtcaaaacttacttggtaaacgtgttgactattcaggacgttcagttattgcagtaggtccaagcttgaaaatgtaccaatgtggtttaccaaaagaaatggcacttgaactatttaaaccattcgtaatgaaagaattagttcaacgtgaaattgcaactaacattaaaaatgcgaagagtaaaatcgaacgtatggatgatgaagtttgggacgtattggaagaagtaattagagaacatcctgtattacttaaccgtgcaccaacacttcatagacttggtattcaagcatttgaaccaactttagttgaaggtcgtgcgattcgtctacatccacttgtaacaacagcttataacgctgactttgacggtgaccaaatggcggttcacgttcctttatcaaaagaggcacaagctgaagcaagaatgttgatgttagcagcacaaaacatcttgaaccctaaagatggtaaacctgtagttacaccatcacaagatatggtacttggtaactattaccttactttagaaagaaaagatgcagtaaatacaggcgcaatctttaataatacaaatgaagtattaaaagcatatgcaaatggctttgtacatttacacactagaattggtgtacatgcaagttcgttcaataatccaacatttactgaagaacaaaacaaaaagattcttgctacgtcagtaggtaaaattatattcaatgaaatcattccagattcatttgcttatattaatgaacctacgcaagaaaacttagaaagaaagacaccaaacagatatttcatcgatcctacaactttaggtgaaggtggattaaaagaatactttgaaaatgaagaattaattgaacctttcaacaaaaaattcttaggtaatattattgcagaagtattcaacagatttagcatcactgatacatcaatgatgttagaccgtatgaaagacttaggattcaaattctcatctaaagctggtattacagtaggtgttgctgatatcgtagtattacctgataagcaacaaatacttgatgagcatgaaaaattagtcgacagaattacaaaacaattcaaccgtggtttaatcactgaagaagaaagatataatgcagttgttgaaatttggacagatgcaaaagatcaaattcaaggtgaattgatgcaatcacttgataaaactaacccaatcttcatgatgagtgattcaggtgcccgtggtaacgcatctaactttacacagttagcaggtatgcgtggattgatggccgcaccatctggtaagattatcgaattaccaatcacatcttcattccgtgaaggtttaacagtacttgaatacttcatctcaactcacggtgcacgtaaaggtcttgccgatacagcacttaaaacagctgactcaggatatcttactcgtcgtcttgttgacgtggcacaagatgttattgttcgtgaagaagactgtggtactgatagaggtttattagtttctgatattaaagaaggtacagaaatgattgaaccatttatcgaacgtattgaaggtcgttattctaaagaaacaattcgtcatcctgaaactgatgaaataatcattcgtcctgatgaattaattacacctgaaattgctaagaaaattacagatgctggtattgaacaaatgtatattcgctcagcatttacttgtaacgcacgacatggtgtttgtgaaaaatgttacggtaaaaaccttgctactggtgaaaaagttgaagttggtgaagcagttggtacaattgcagcccaatctatcggtgaaccaggtacacagcttacaatgcgtacattccatacaggtggggtagcaggtagcgatatcacacaaggtcttcctcgtattcaagagattttcgaagcacgtaaccctaaaggtcaagcggtaattacggaaatcgaaggtgtcgtagaagatattaaattagcaaaagatagacaacaagaaattgttgttaaaggtgctaatgaaacaagatcataccttgcttcaggtacttcaagaattattgtagaaatcggtcaaccagttcaacgtggtgaagtattaactgaaggttctattgaacctaagaattacttatctgttgctggattaaacgcgactgaaagctacttattaaaagaagtacaaaaagtttaccgtatgcaaggtgtagaaatcgacgataaacacgttgaggttatggttcgacaaatgttacgtaaagttagaattatcgaagcaggtgatacgaagttattaccaggttcattagttgatattcataactttacagatgcaaatagagaagcatttaaacaccgtaagcgtcctgcaacagctaaaccagtattacttggtattactaaagcatcacttgaaacagaaagtttcttatctgcagcatcattccaagaaacaacaagagttcttacagatgcagcaattaaaggtaagcgtgatgacttattaggtcttaaagaaaacgtaattattggtaagttaattccagctggtactggtatgagacgttatagcgacgtaaaatacgaaaaaacagctaaaccagttgcagaagttgaatctcaaactgaagtaacggaataacaagtatataacagaggctaatgctttagcctcttgttatttttatgtaaattatttgatttaatgttgacgaattctcttgttcaatgttaatatattaaaggttgatgcaagcagaactttggaggataaattattgtctaaggaaaaagttgcacgctttaacaaacaacattttgtagttggtcttaaagaaacgcttaaagcgttaaagaaagatcaagttacatctttgattattgctgaagacgttgaagtatatttaatgactcgcgtgttaagccaaatcaatcagaaaaatatacctgtatcttttttcaaaagcaaacatgctttgggtaaacatgtaggtattaacgtcaatgcgacaatagtagcattgattaaatgagaattagtaagtgttttacttactaaattttatttaacctaaaaatgaaccacctggatgtgtgggattaaaaagtgaagagaggaggacatatcacatgccaactattaaccaattagtacgtaaaccaagacaaagcaaaatcaaaaaatcagattctccagctttaaataaaggtttcaacagtaaaaagaaaaaatttactgacttaaactcaccacaaaaacgtggtgtatgtactcgtgtaggtacaatgacacctaaaaaacctaactcagcgttacgtaaatatgcacgtgtgcgtttatcaaacaacatcgaaattaacgcatacatccctggtatcggacataacttacaagaacacagtgttgtacttgtacgtggtggacgtgtaaaagacttaccaggtgtgcgttaccatattgtacgtggagcacttgatacttcaggtgttgacggacgtagacaaggtcgttcattatacggaactaagaaacctaaaaactaagaatttagtttttaattaaatcttaaacttaaaatatttaatataaggaagggaggatttacattatgcctcgtaaaggatcagtacctaaaagagacgtattaccagatccaattcataactctaagttagtaactaaattaattaacaaaattatgttagatggtaaacgtggaacagcacaaagaattctttattcagcattcgacctagttgaacaacgcagtggtcgtgatgcattagaagtattcgaagaagcaatcaacaacattatgccagtattagaagttaaagctcgtcgcgtaggtggttctaactatcaagtaccagtagaagttcgtccagagcgtcgtactactttaggtttacgttggttagttaactatgcacgtcttcgtggtgaaaaaacgatggaagatcgtttagctaacgaaattttagatgcagcaaataatacaggtggtgccgttaagaaacgtgaggacactcacaaaatggctgaagcaaacaaagcatttgctcactaccgttggtaagataaaagcttttaccctgagtgtgttctatattaatgaattttcattaagcgttcatgcttagggcatcgccatatctatcgtatttattcagtaatataaactggaaggagaaaaaatacatggctagagaattttcattagaaaaaactcgtaatatcggtatcatggctcacattgatgctggtaaaacgactacgactgaacgtattctttattacactggccgtatccacaaaattggtgaaacacacgaaggtgcttcacaaatggactggatggagcaagaacaagaccgtggtattactatcacatctgctgcaacaacagcagcttgggaaggtcaccgtgtaaacattatcgatacacctggacacgtagacttcactgtagaagttgaacgttcattacgtgtacttgacggagcagttacagtacttgatgcacaatcaggtgttgaacctcaaactgaaacagtttggcgtcaggctacaacttatggtgttccacgtatcgtatttgtaaacaaaatggacaaattaggtgctaacttcgaatactctgtaagtacattacatgatcgtttacaagctaacgctgctccaatccaattaccaattggtgcggaagacgaattcgaagcaatcattgacttagttgaaatgaaatgtttcaaatatacaaatgatttaggtactgaaattgaagaaattgaaattcctgaagaccacttagatagagctgaagaagctcgtgctagcttaatcgaagcagttgcagaaactagcgacgaattaatggaaaaatatcttggtgacgaagaaatttcagtttctgaattaaaagaagctatccgccaagctactactaacgtagaattctacccagtactttgtggtacagctttcaaaaacaaaggtgttcaattaatgcttgacgctgtaattgattacttaccttcaccactagacgttaaaccaattattggtcaccgtgctagcaaccctgaagaagaagtaatcgcgaaagcagacgattcagctgaattcgctgcattagcgttcaaagttatgactgacccttatgttggtaaattaacattcttccgtgtgtattcaggtacaatgacatctggttcatacgttaagaactctactaaaggtaaacgtgaacgtgtaggtcgtttattacaaatgcacgctaactcacgtcaagaaatcgatactgtatactctggagatatcgctgctgcggtaggtcttaaagatacaggtactggtgatactttatgtggtgagaaaaatgacattatcttggaatcaatggaattcccagagccagttattcacttatcagtagagccaaaatctaaagctgaccaagataaaatgactcaagctttagttaaattacaagaagaagacccaacattccatgcacacactgacgaagaaactggacaagttatcatcggtggtatgggtgagcttcacttagacatcttagtagaccgtatgaagaaagaattcaacgttgaatgtaacgtaggtgctccaatggtttcatatcgtgaaacattcaaatcatctgcacaagttcaaggtaaattctctcgtcaatctggtggtcgtggtcaatacggtgatgttcacattgaattcacaccaaacgaaacaggcgcaggtttcgaattcgaaaacgctatcgttggtggtgtagttcctcgtgaatacattccatcagtagaagctggtcttaaagatgctatggaaaatggtgttttagcaggttatcctttaattgatgttaaagctaaattatatgatggttcataccatgatgtcgattcatctgaaatggccttcaaaattgctgcatcattagcacttaaagaagctgctaaaaaatgtgatcctgtaatcttagaaccaatgatgaaagtaactattgaaatgcctgaagagtacatgggtgatatcatgggtgacgtaacatctcgtcgtggacgtgttgatggtatggaacctcgtggtaatgcacaagttgttaatgcttatgtaccactttcagaaatgttcggttatgcaacatcattacgttcaaacactcaaggtcgcggtacttacactatgtacttcgatcactatgctgaagttccaaaatcaatcgctgaagatattatcaagaaaaataaaggtgaataatataacttgttttgactagctagcctaggttaaaatacaaggtgagcttaaatgtaagctatcatctttatagtttgattttttggggtgaatgcattataaaagaattgtaaaattctttttgcatcgctataaataatttctcatgatggtgagaaactatcatgagagataaatttaaatattatttttaattagaataggagagattttataatggcaaaagaaaaattcgatcgttctaaagaacatgccaatatcggtactatcggtcacgttgaccatggtaaaacaacattaacagcagcaatcgctactgtattagcaaaaaatggtgactcagttgcacaatcatatgacatgattgacaacgctccagaagaaaaagaacgtggtatcacaatcaatacttctcacattgagtaccaaactgacaaacgtcactacgctcacgttgactgcccaggacacgctgactacgttaaaaacatgatcactggtgctgctcaaatggacggcggtatcttagtagtatctgctgctgacggtccaatgccacaaactcgtgaacacattcttttatcacgtaacgttggtgtaccagcattagtagtattcttaaacaaagttgacatggttgacgatgaagaattattagaattagtagaaatggaagttcgtgacttattaagcgaatatgacttcccaggtgacgatgtacctgtaatcgctggttcagcattaaaagctttagaaggcgatgctcaatacgaagaaaaaatcttagaattaatggaagctgtagatacttacattccaactccagaacgtgattctgacaaaccattcatgatgccagttgaggacgtattctcaatcactggtcgtggtactgttgctacaggccgtgttgaacgtggtcaaatcaaagttggtgaagaagttgaaatcatcggtttacatgacacatctaaaacaactgttacaggtgttgaaatgttccgtaaattattagactacgctgaagctggtgacaacattggtgcattattacgtggtgttgctcgtgaagacgtacaacgtggtcaagtattagctgctcctggttcaattacaccacatactgaattcaaagcagaagtatacgtattatcaaaagacgaaggtggacgtcacactccattcttctcaaactatcgtccacaattctatttccgtactactgacgtaactggtgttgttcacttaccagaaggtactgaaatggtaatgcctggtgataacgttgaaatgacagtagaattaatcgctccaatcgcgattgaagacggtactcgtttctcaatccgtgaaggtggacgtactgtaggatcaggcgttgttactgaaatcattaaataatttctaatttcttagattttatataaaaagaagatccctcaatcgaggggtctttttttaatgtgtaaattttgtaatggctattcgatttagaagaacaataattgatgaaagactgactaataaaacttataactgataatactgtttaaataaaattgttgagtcttggacattgtaaaatgctcccttcaaagttttcattttttcaatgtctactttgaagggagcatttcattagtttatgtctcagattcatatctttcaattaatttaaatgcttaatttgttttaaatacttgctctaattctatgatttttaaaaatacagctacagcgtattttaatgatttttcatcaatatcaaatttgggattatggtgtggcgctgtaatacctttactttcattaccacaaccagtcagaaagaatgcacctggtcgtactttcaaataatgtgaaaaatcttctccaatcatcattaaatctgattcattaaagcgtacatgtaagtcatttgttgcttctttaataacttgatatgctttctcgttattatggacaggcaaataccctttaatataattcaaatcatagttaatatcatttgctattgctaaaccttgtagaagcttatccattttgtccattacatgattctgtatatctgaatcgaaagttctaactgtacctttacaaaatgcttgatcaggaataacgctatctgtggtgcctgcttgaatcattccaaatgaaagtacagcttgtttaactggatcgatcgtacgtgaaattattttttgtgcacttaaaatgaactctgccatgattactattgggtcaatggtttcatgaggtttggcaccatgaccaccacgacctttaaatgtgacgctaaattcatctggagaggccatgattgcccccgcacgtgaatgaatagttccagtaggataaccactccataaatgtgtaccgtaaattctatctacattttccagacatccagcatctatcatttcttgagaaccacctggcatgatttcttcaccgtactggaatattaatacaacattaccttctaataaatgtttatgttcatctaaaatctctgctacagtaagtaaaattgctgtatgaccatcatgcccacacgcatgcatacatcctggatttttagacttataaggcacatcgtttaattcctcgacaggtaacgcatcaaagtcagctcttaatgcaatggtaggtcctgtgcccaagcctttaaatgtggctttgataccattgcggccgataggagtttcaatatcacaagataactggcttaattggttaacaatataatcatgtgtttgaaattcttcaaaagataactcaggatattggtgtaaataacgtctgagttgaattgttttattttctttattatttgctagttggaaccaatctaacacccttatcactactttctaaaataatgtttatagtataacattttatgaaattatcgtactaaatgattgctttgagatattttatctatgaatgataaggctttcaagttatgtagaattactgtatgataaaggtattaccaaacaatacttaagggggattatatactgtggttcaatcattacatgagtttttagaggaaaatataaattatctaaaagaaaatggtttgtataatgaaatagatacaattgaaggtgcaaacggaccagaaatcaaaatcaatgggaaatcatacattaacttatcttcaaataattatttaggactagcaacaaatgaagatttgaaatcagctgcaaaagcagctattgatacacatggtgtaggtgcaggcgctgttcgtacaatcaatggtacattagatttacacgacgaattagaagaaacactagcaaaatttaaaggaacagaagctgcaatagcttatcaatcaggatttaattgtaatatggctgctatttcagctgtcatgaataaaaatgatgctattttatcagatgagcttaatcatgcatcaattattgatggatgtcgcttatctaaagctaaaattattcgagttaaccattcagacatggatgatttacgtgcgaaagcaaaagaagcagttgaatcaggtcaatacaataaagtgatgtatatcactgatggcgtttttagtatggatggtgatgtggctaaattacctgaaattgtagaaattgcagaagaatttggtttattaacttatgttgacgacgctcatggttcaggtgttatgggtaaaggcgctggtacggttaaacattttggtttacaagataaaatcgatttccaaataggtacgctttctaaagcaattggtgtcgttggcggttatgtagcaggtacaaaagagttaatagattggttaaaagcacaatcacgaccattcttattctctacatcattagcacctggggataccaaagcaataactgaagcagttaaaaagttaatggattcaactgaattacatgataaattatggaacaatgcacaatatttaaaaaatggattgtcaaaattaggatatgatacaggtgagtcagaaactccaattacaccagtaattattggtgatgaaaaaacaactcaagaatttagtaagcgtttaaaagacgaaggtgtctatgtgaaatctatcgttttcccaacagtaccaagaggtacaggacgtgtaagaaatatgcctacagctgcacatacaaaagacatgttagatgaagcaattgcggcttatgaaaaagtaggaaaagaaatgaagttgatttaatatttatttattcccacggcaaatattgtcgtgggctttttttaatgtttagtttattaacagtaagttcgtatatcaatgtttagtgctccccaaaattgaagtttgaattttaaaagcatcttgtagaatttagttgtatttttttcaaagaaattcattttgattatttttgataatgagcattttaatagtaatacatgtttatagtgtgtagtatatgtctatactagtagtaactatatagagaaagtaggaataaactatgtcacaagatgtaaatgaattaagtaagcaaccaacgccagataaagcagaagataacgcatttttcccatcaccatattcccttagtcaatatacagcacctaaaacagattttgatggtgttgaacacaaaggtgcctataaagatggtaaatggaaagtattgatgattgctgctgaagagcgatatgtattattggaaaatggaaaaatgttctctacgggtaatcatcctgttgaaatgttattacctttacatcatttaatggaagcaggttttgacgttgatgttgcgacattatctggttatccagttaaattagaattatgggctatgccaactgaagacgaggcagttataagtacttataataaattgaaagaaaaattaaaacagccaaaaaaattagcagatgtgattaaaaatgaattaggacctgattcagactatttatctgtctttatcccaggcggacatgctgcagttgttggtatttctgaaagtgaggacgttcaacaaacattagattgggcattagacaatgaccgctttatagttacattatgtcatggaccagcagcactactttcagcagggcttaacagagaaaaatctccattagaaggatactctgtttgtgtcttccctgactcattagatgaaggtgcaaatattgaaataggttatttacctggacgcttgaaatggttagttgctgatttattaactaaacaaggattaaaagtagttaacgacgatatgacaggaagaacgttaaaagatcgtaaattattaacaggtgacagtcctttagcttcaaatgagttaggaaaattagcagttaatgaaatgttaaatgcaatacaaaataaataattaaatattaattagaggagcctcatatgtaaatgtatgagggctcttttttttggcaaaatttaagtgatacttgtaaaatagaacctattatgagtatgatttaagaaaacgcttgcaaaactaataaccgcaactagcgatatggaggaaacatgatgtcttatagcattggaattgattatggaactgcttcaggccgtgtgtttttaattaatacaactaacggtcaagtagtatcaaaatttgtgaaaccatatacacatggtgtcattgagagtgaattaaatggtttgaaaataccacatacatatgcacttcaaaatagtaatgattatttagaaattatggaagaaggaatatcatatatagtacgtgaatcaaaaatagatccagacaatatagtaggtattggtatagactttacttcatctactattatttttactgacgaaaaccttaacccggtacataacttaaaacaatttaaaaacaatccacatgcgtatgtgaaactttggaaacatcatggtgcatataaagaggcagagaaattatatcaaactgctattgaaaataataataagtggttaggccattatggatataatgttagtagtgaatggatgattcccaaaataatggaggtcatgaatcgagcaccagaaattatggaaaaaacggcttatattatggaagcgggcgattggattgtaaataaattaactaataaaaatgtacgctcgaattgtggattaggtttcaaagcattttgggaagaagaaacagggtttcattatgatttatttgataaaatagaccccaaattatcaaaagtaattcaagataaagtatctgcaccggttgttaatattggtgaagcagtagggaaactggatgataaaatggcacagaaattaggattatcaaaagaaactatggtaagtccttttattattgatgcccatgctagtttattaggtattgggtctgaaaaagataaagaaatgactatggtgatgggaacaagcacatgccatcttatgttaaatgaaaagcaacatcaagtgccaggtatatcaggttctgtaaaaggagcaattattccagaattatttgcttatgaagcggggcaatcagcagtaggtgatttgtttgagtatgtcgctaagcaagcaccaaagtcatatgtagatgaagcagaaaatagaaatatgactgtatttgaattaatgaatgaaaagataaaacatcaaatgccaggtgaaagtgggctcattgctcttgattggcataatggaaatcgaagtgtattaagtgatagcaatttaacaggttgtatctttggattaactttacaaactaagcatgaggatatttatagagcatatttagaagctacagcatttggtactaagatgattatgcaacagtatcaagattggcatatggaagtagaaaaggtatttgcatgtggcggtatacctaaaaagaatgctgttatgatggatatctatgcgaatgtactgaataaaaaactaattgttatggatagtgagtatgcaccagcaataggcgcagcaatattaggtgcagtcagtggtggcgcacataattcaattaatgacgcagttgatgctatgaaagagccaattttatacgaaattaatccagaagcggaaaaagtacaaaggtatgaaacattatttaaagcttataaggctttacatgatatccatggttataaaaaagctaatataatgaaagatatccagagtttaagagttgagggataaaaaatttaatttgacagtaattagcaataataaacgctataaattactaaaatcaattaatacaactagaatttccatttacagaaatatcagcaacatgtacatgtcatatatacaagaaagcgcttttatattataattattatgaaaatgaatattatgtccgcttgtgatggactatagctatatagaagagacaaaggagatatttctatgaaaaaaattatgattactggtgcattaggacaaattggtacagaattagttgttaagtgcagagaaatttatgggacagataatgttcttgctacagatattagggaacctgaagcagactcacctgtacaaaatggaccatttgaaatcttagacgtaacagatcgtgaccgtatgtttgagttagttagggactttgaagcggatagtctaatgcatatggcagcattattatcagcaactgctgagaaaaatccaattctagcttgggatttaaatatgggtggattaatgaatgcattagaagctgcaagaacttataatttgcactttttcacaccaagttcaattggtgcatttggagactcaactcctaaagttaatacgccacaagtaacgattcagcaacctacgacaatgtatggtgtaaataaagtagctggagaattattgtgtcaatactatttcaaacgttttggtgtagatacaagaagtgttagattcccaggtttaatctcgcatgttaaagagccaggtggcggtactacagactatgctgttgaaatatacttcaaagcagtaagagagggtcattatacaagcttcatagataaaggcacgtatatggatatgatgtatatggatgatgcaattgaagcaattattaaacttatggaagcagacgacgctaaattagaaactagaaatggttataatttgagcgcaatgagttttgatccagagatggtaaaagaagcaattcaagaatactatcccaattttacattagattacgatgttgatcctattagacaaggtatcgctaatagttggccggattctattgatacaagctgttcacgtggcgaatggggatttgatcctaaatatgatttagcgagcatgactaaattaatgttagaagctattgaacaaaaagatactgttaaaaataataactaatcatttccattcactttaatacacggaatgatattttaaattactctttattttaataaactagtgcatgaattctaatattattcattatacttattgaattcgcgagcttagttcattttaaagtaaagagttttttgtatgtaaagtatattagtaaaacacagattacttgtctctgtgaaattaatacgtttatactaaaagatatagtctttctagaaatctgttaattaattttgaatttttagaaaatttgttgaacagcaaaatatggattgttataatttaagttaaacaaattcttatacaatattattaggaggcaatcaccatgtcacaagcagttaaagttgaacgacgagaaacattaaaacaaaaaccaaatacatctcaactaggttttggtaaatattttactgattatatgttgagttatgattatgatgcagataaaggatggcatgatttgaagatagtaccttatggtcctattgaaatttcacctgctgcacaaggtgttcattatggtcaatcggtattcgaaggattaaaagcatataaaagagatggggaagttgcacttttccgtcctgaagaaaattttaagcgtcttaataactcgttagcacgattagaaatgcctcaagtagacgaagcagaattgttagaggggctaaaacaattagttgatattgaaagagattggattcctgaaggggaaggtcaatcattatatattcgtccatttgtttttgcaacagaaggggcacttggcgttggtgcatcacatcagtataaattattaattattttatctccttcaggtgcatattatggtggtgaaactttaaaaccaactaaaatctatgtagaagatgaatatgtgcgtgctgttcgtggcggtgtaggctttgcaaaagttgcaggtaactatgcggcaagtttattagcacaaactaatgcaaataaattaggttatgaccaagtattatggcttgatggtgttgaacagaaatatatcgaagaagttggtagcatgaacattttcttcgttgaaaatggcaaagtaattacaccagagttgaatggcagtattttacctggtattacacgtaaatctattatcgaattagctaaaaacttaggatatgaagtcgaagagcgccgcgtttcaatcgatgaattattcgaatcatatgataaaggtgagttaacagaagtatttggtagtggtactgcagcagttatttcacctgtgggtacattgagatacgaagatcgtgaaatcgttattaataataatgagactggtgaaattactcaaaaattatacgacgtctatactggtattcaaaatggtactttagaagataaaaatggttggagagtcgttgtaccaaaatattaataaaaattgaatataatcatgaaaacaatatgcaaaagttaatcatgactaaaatccctttcaatgaagcgaagcatggtaataaattaagtttacaatgtttattgttaagtattgaaggggatttcacttattattatatttaattcaatatttaaatagaacaatactacgagttcattttcaggggataacgaatatcatagaatcagcataatacgaaataaataaataggagtattgatatcaatggaatggatattatttgataaagatggtacgttaattgaatttgatagaagttgggaaaaaataggggtacgatttgtacaatcattgcttgagactttcccagtacataataaagaagctgctttaagacaactcggtgtcattaaagaatctattgatccaaaatcagtgatgggttcaggatctttacaacaaattatccaggcatttaatgatgtgacgggacaagatacaaccgactggtccaagtcaacaagtcaaaagctggtagatgaacgtattcctgaaattaattgggtagaaggtgttaaagaagcacttatcgatttgaaagcaaaaggctatcaacttggtattgttacgagtgatactaaaaaaggtgtagaacaatttttagcacataccaatgctacctcgttgttcgatttgatcatttctaccgaagcggatgcctatgagaagccaaatcctaaagtattatcgcctttatttgagcaatataatgtagatcctcagaaagtagctatagtaggagacactgctaatgatatgaagacagcaagtaatgcaaatttaggtatggcaataggtgtattaacaggtattgcaacaaaagaagaattacatgaagctgatattattttaaatagtgcggcagatattttagaagctttaaattaaaaagaaagacatagtgtatatgtgaattaatgtattcgatagaattgataaaataatcgataatatctatggaatatacattgaatataaacatatacgctatgtctttagtcttttatcgtgtatctacttgtcgatatgtttgaataattcgagcaattttgtttatcataggatttaaagattcggggtccttatggatatcatattcattaatattgatacgtacaactggacatgcattaaagctattaatccaatcgtcatagcgtttaaatagctttttccagtattcagggtctgtattaatttccatttcgcgaccacgttcaataatacgatcaatgacctcatcatagttacattctaaataaatcattacatcaggtttaggaaaataaggtgtcatgaccatggcattaaataagtctgaatatgttttgaaatcttctttactcattgtgccttcttcttcatgcatttttgcaaaaatatcaacatcttcataaattgatcgatcttggacaaagccaccaccatattcaaacatacgcttttgttctttaaaacgttcagctaagaagtaaatttgcaaatggaaactccatcgttcaaaatcgctgtaaaatttatctaaatatggattatgttcgacattttcaaaagacgttttaaagtttaatttatctgcaagtgcttgcgttagtgttgattttccaacaccaactgtacctgcaatggttataatggcattttgtggaataccgtaattattcattggtaatatctcctatcataggtaatataatatgtaatatatcttcgtaatcttgttcatttttaagaaaatcaatagaagttgtatcgattaaaactacatttgaaccattactttgtaaggactcataatactcacgataatctttttttaactttaacagatattcatcttctatttgatgctcaaaactacggttacgtttagcaattctagattttaacacatcaaggtctgcatctaaaaagataatcatattcggcataatcatatcttcagttaaaatatcataaattttactgaatttctgaaattcaacagaactcaaagtatttttagcaaatatcttatttttatgtatatgataatcactaactacaccttgatttagttgtgttacatcttgaaattgcttatatctattgcataaaaagaacatttcagtttgaaaactccatttagagatatcttcataaaagtctgataaaaatggattttctgtgatgatttctttttcttcataaaaatctaaagtttgacttaatttgtgtgcaagtgaagatttacctacgccaataggaccttcaattgctataaaaggtttgttcatattcacatctccaaatgttaaaatagacattgagtattgtaccataagtgaggtatctggacataaatgacaaatgatatatattttatgacattagcgattgaagaagctaaaaaagcagctcaactaggcgaagtacctataggtgctatcatcactaaagatgatgaagttatcgctagagcacataatttaagagaaacactacaacaaccaacggcgcatgctgaacatattgcaattgaacgtgcagccaaagtgttaggtagttggcgtttagaaggttgcacattatatgtaaccttagaaccatgtgtcatgtgcgcaggaacaattgtaatgagtcgcattccaagagtcgtctatggcgcagatgatcctaaaggtggttgtagtggcagtttaatgaatttattgcaacaatctaattttaatcatcgtgcaattgttgataaaggtgtacttaaagaagcatgtagcacattattaacaacattttttaaaaacttaagagccaataagaaatccaccaattagacgatagtacatactaattaaaatttgttagaattacattatatgataaattaatgacaatataaatgttaatagaaaagtatgtgcgctgagtatatattcttatttaagaacaagattttaaatttacgaaacgaggtaacataatgataaaactaatagccactgatatggatggcacgctacttaatgcagcacatgaaatttctcaacctaatattgatgcgattaaatacgctcaagaacaagggataacggttgttatcgcgacaggtcgagcattttatgaagcacaagcaccagttgctgacacagatttaacagtaccatatatttgtttgaatggtgctgaagtacgtgatgaaactttcaatgtaatgagcacttcacaccttaataaatcgttagtacacaaaattacaaatgttttaaaagatgcaggtatttattatcaagtatacacgagtcgtgcgatttatactgaagatccacaaagagatttagacatttacatagatattgctgagcgtgcaggtcaacatgcaaacgttgagcgtattaaaaatggtattcaaagacgcatagataatggtacgttgaaagttgttgataattatgatgctattgaaaacatacctggtgaattaattatgaaaatattagcatttgatggaaatttagaaaaaattgacaaagctagtaaaattttagctgaatctccgaatttagctatatcatcatcttcgagaggaaatatagaaataacgcattcagatgcacaaaaaggtattgcgctagaaacaattgccgaaagattagggattgaaatgaaagaagtcatgtcaataggtgacaatttaaatgacttatcaatgttagagaaagttggctatccagttgcgatggaaaatggtgcagaagaagttaaaaaaatagcgaaatatgtcacagatacgaatgaaaatagtggtgttggaaaagctattatgaaattattacgtgaacaacaagtttaataaaaaaagaggggtcaaatatgaaaggattaattattattggcagtgcacaagtgaattcacatacaagtgcactagcaagatacttaactgagcattttaaaacacatgatattgaagcggaaatattcgatttagcagaaaaaccgttaaatcaattagatttttcaggaacaacaccgtctattgatgaaatcaaacaaaatatgaaagatttaaaagagaaagcaatggcggcggactttttaatattaggaacgccaaactatcatggttcatattctggaatattgaaaaatgcattagatcatctaaatatggattattttaaaatgaaacctgtaggcttaataggaaatagtggtggtattgttagttcagagccattgtcacatttaagagtaatcgtcagaagtttactaggcattgctgtaccaactcaaatagcaacacatgattctgattttgctaaaaatgaagatggttcatattacttaaatgatagtgaattccaattacgagcaagattatttgtcgatcaaattgtatcttttgtgaataatagtccatatgaacatttaaaataatattaaaaaatatgtaaatatacattaaaaataggtatgtagcttaaggtatttcattgagaatgcttttaagtcacatgcctattttttgttctaatgcaccaatagtaagcctttgatattactgttgtgagcaatgttattaattaaaataagatgtaatagcgaattgaaaacaagcttagattaaaagtgagttttaaaaatatagataaataatttaaagcaattaaagaaaaaaagtattaaaaattgcaattcttaaactgttattcatattaatatttctagcaaataacattgtaaaataaagaaaaataattaaagtattgcactttattgaaatttatattacgatagtaatgcagaaatttatatatgcaaaatattatatttatcaaattttgatattttaaaggagtattattaaatgaataataaaaagacagcaacaaatagaaaaggcatgataccaaatcgattaaacaaattttcgataagaaagtattctgtaggtactgcttcaattttagtagggacaacattgatttttgggttaagtggtcatgaagctaaagcggcagaacatacgaatggagaattaaatcaatcaaaaaatgaaacgacagccccaagtgagaataaaacaactaaaaaagttgatagtcgtcaactaaaagacaatacgcaaactgcaactgcagatcagcctaaagtgacaatgagtgatagtgcaacagttaaagaaactagtagtaacatgcaatcaccacaaaacgctacagctaatcaatctactacaaaaactagcaatgtaacaacaaatgataaatcatcaactacatatagtaatgaaactgataaaagtaatttaacacaagcaaaagatgtttcaactacacctaaaacaacgactattaaaccaagaactttaaatcgcatggcagtgaatactgttgcagctccacaacaaggaacaaatgttaatgataaagtacatttttcaaatattgacattgcgattgataaaggacatgttaatcagactactggtaaaactgaattttgggcaacttcaagtgatgttttaaaattaaaagcaaattacacaatcgatgattctgttaaagagggcgatacatttacttttaaatatggtcaatatttccgtccaggatcagtaagattaccttcacaaactcaaaatttatataatgcccaaggtaatattattgcaaaaggtatttatgatagtacaacaaacacaacaacatatacttttacgaactatgtagatcaatatacaaatgttagaggtagctttgaacaagttgcatttgcgaaacgtaaaaatgcaacaactgataaaacagcttataaaatggaagtaactttaggtaatgatacatatagcgaagaaatcattgtcgattatggtaataaaaaagcacaaccgcttatttcaagtacaaactatattaacaatgaagatttatcgcgtaatatgactgcatatgtaaatcaacctaaaaatacatatactaaacaaacgtttgttactaatttaactggatataaatttaatccaaatgcaaaaaacttcaaaatttacgaagtgacagatcaaaatcaatttgtggatagtttcacccctgatacttcaaaacttaaagatgttactgatcaattcgatgttatttatagtaatgataataaaacagctacagtcgatttaatgaaaggccaaacaagcagcaataaacaatacatcattcaacaagttgcttatccagataatagttcaacagataatggaaaaattgattatactttagacactgacaaaactaaatatagttggtcaaatagttattcaaatgtgaatggctcatcaactgctaatggcgaccaaaagaaatataatctaggtgactatgtatgggaagatacaaataaagatggtaaacaagatgccaatgaaaaagggattaaaggtgtttatgtcattcttaaagatagtaacggtaaagaattagatcgtacgacaacagatgaaaatggtaaatatcagttcactggtttaagcaatggaacttatagtgtagagttttcaacaccagccggttatacaccgacaactgcaaatgtaggtacagatgatgctgtagattctgatggactaactacaacaggtgtcattaaagacgctgacaacatgacattagatagtggattctacaaaacaccaaaatatagtttaggtgattatgtttggtacgacagtaataaagatggtaaacaagattcgactgaaaaaggaattaaaggtgttaaagttactttgcaaaacgaaaaaggcgaagtaattggtacaactgaaacagatgaaaatggtaaataccgctttgataatttagatagtggtaaatacaaagttatctttgaaaaacctgctggcttaactcaaacaggtacaaatacaactgaagatgataaagatgccgatggtggcgaagttgatgtaacaattacggatcatgatgatttcacacttgataatggctactacgaagaagaaacatcagatagcgactcagattctgacagcgattcagactcagatagcgactcagattcagatagcgactcagattcagacagcgattcagacagcgactcagactcagatagcgattcagattcagacagcgactcagactcagacagcgattcagactcggatagcgactcagactcagatagcgactcagattcggatagcgactcagactcagatagcgattcagattcagatagcgattcggactcagacagtgattcagattcagactcagatagcgactcagattctgacagcgattcagactcagacagcgactcagactcagacagtgattcagattcagacagcgactcagattcagatagcgactcagactcagatagcgactcagattcagatagcgattcggactcagacaacgactcagattcagatagcgattcagattcagatagcgactcagattcggacagcgattcagactcagatagcgattcagactcagacagcgattcagattcagatagcgactcagactcagatagcgactcagactcggatagcgattcagattcagacagcgactcagattcagatagcgattcggactcagacaacgactcagattcagatagcgattcagattcagatgcaggtaaacatactccggctaaaccaatgagtacggttaaagatcagcataaaacagctaaagcattaccagaaacaggtagtgaaaataataattcaaataatggcacattattcggtggattattcgcggcattaggatcattattgttattcggtcgtcgtaaaaaacaaaataaataatatgattaacttaaccaggtccatgtggcctggttttttctgtttagaaattcccagatataaaacaaaaaatctttaaggaatagatacaatttaatttgttacagaaatgtaattgtctatgaattagaaaagctaagatattaatttcaagggcaaataatactattttttatgatgattaaataaagattacaaaactcataaaaacttttatttaaacacaaatgttaaataacgttttacgataaagaaaaataattaaagtattgtgctttatctaaaaatgtaatactatattgatatacatttttgtatttaaaacaattgtattatttaaaaatttgatgaattaggagtaatctaatgctaaacagagaaaataaaacggcaataacaaggaaaggcatggtatccaatcgattaaataaattttcgattagaaagtacacagtgggaacagcatcaattttagtaggtacaacattaatttttggtctggggaaccaagaagcaaaggctgcagaaagtactaataaagaattgaacgaagcgacaacttcagcaagtgataatcaatcgagtgataaagttgatatgcagcaactaaatcaagaagacaatactaaaaatgataatcaaaaagaaatggtatcatctcaaggtaatgaaacgacttcaaatgggaataaattaatagaaaaagaaagtgtacaatctaccactggaaataaagttgaagtttcaactgccaaatcagatgagcaagcttcaccaaaatctacgaatgaagatttaaacactaaacaaactataagtaatcaagaagcgttacaacctgatttgcaagagaataaatcagtggtaaatgttcaaccaactaatgaggaaaacaaaaaggtagatgccaaaactgaatcaactacattaaatgttaaaagtgatgctatcaagagtaatgatgaaactcttgttgataacaatagtaattcaaataatgaaaataatgcagatatcattttgccaaaaagtacagcacctaaacgtttgaatacaagaatgcgtatagcagcagtacagccatcatcaacagaggctaaaaatgttaatgatttaatcacatcaaatacaacattaactgtcgttgatgcagataaaaacaataaaatcgtaccagcccaagattatttatcattaaaatcacaaattacagttgatgacaaagttaaatcaggtgattatttcacaattaaatactcagatacagtacaagtatatggattgaatccggaagatattaaaaatattggtgatattaaagatccaaataatggtgaaacaattgcgactgcaaaacatgatactgcaaataatttaattacatatacatttacagattatgttgatcgatttaattctgtacaaatgggaattaattattcaatttatatggatgctgatacaattcctgttagtaaaaacgatgttgagtttaatgttacgataggtaatactacaacaaaaacaactgctaacattcaatatccagattatgttgtaaatgagaaaaattcaattggatcagcgttcactgaaacagtttcacatgttggaaataaagaaaatccagggtactataaacaaacgatttatgtaaatccatcggaaaattctttaacaaatgccaaactaaaagttcaagcttaccactcaagttatcctaataatatcgggcaaataaataaagatgtaacagatataaaaatatatcaagttcctaaaggttatacattaaataaaggatacgatgtgaatactaaagagcttacagatgtaacaaatcaatacttgcagaaaattacatatggcgacaacaatagcgctgttattgattttggaaatgcagattctgcttatgttgtaatggttaatacaaaattccaatatacaaatagcgaaagcccaacacttgttcaaatggctactttatcttcaacaggtaataaatccgtttctactggcaatgctttaggatttactaataaccaaagtggcggagctggtcaagaagtatataaaattggtaactacgtatgggaagatactaataaaaacggtgttcaagaattaggagaaaaaggcgttggcaatgtaactgtaactgtatttgataataatacaaatacaaaagtaggagaagcagttactaaagaagatgggtcatacttgattccaaacttacctaatggagattaccgtgtagaattttcaaacttaccaaaaggttatgaagtaaccccttcaaaacaaggtaataacgaagaattagattcaaacggcttatcttcagttattacagttaatggcaaagataacttatctgcagacttaggtatttacaaacctaaatacaacttaggtgactatgtctgggaagatacaaataaaaatggtatccaagaccaagatgaaaaaggtatatctggcgtaacggtaacattaaaagatgaaaacggtaacgtgttaaaaacagttacaacagacgctgatggcaaatataaatttactgatttagataatggtaattataaagttgaatttactacaccagaaggctatacaccgactacagtaacatctggtagcgacattgaaaaagactctaatggtttaacaacaacaggtgttattaatggtgctgataacatgacattagatagtggattctacaaaacaccaaaatataatttaggtaattatgtatgggaagatacaaataaagatggtaagcaggattcaactgaaaaaggtatttcaggcgtaacagttacattgaaaaatgaaaacggtgaagttttacaaacaactaaaacagataaagatggtaaatatcaatttactggattagaaaatggaacttataaagttgaattcgaaacaccatcaggttacacaccaacacaagtaggttcaggaactgatgaaggtatagattcaaatggtacatcaacaacaggtgtcattaaagataaagataacgatactattgactctggtttctacaaaccgacttacaacttaggtgactatgtatgggaagatacaaataaaaacggtgttcaagataaagatgaaaagggcatttcaggtgtaacagttacgttaaaagatgaaaacgacaaagttttaaaaacagttacaacagatgaaaatggtaaatatcaattcactgatttaaacaatggaacttataaagttgaattcgagacaccatcaggttatacaccaacttcagtaacttctggaaatgatactgaaaaagattctaatggtttaacaacaacaggtgtcattaaagatgcagataacatgacattagacagtggtttctataaaacaccaaaatatagtttaggtgattatgtttggtacgacagtaataaagacggcaaacaagattcaactgaaaaaggtatcaaagatgttaaagttactttattaaatgaaaaaggcgaagtaattggaacaactaaaacagatgaaaatggtaaatactgctttgataatttagatagcggtaaatacaaagttatttttgaaaagcctgctggcttaacacaaacagttacaaatacaactgaagatgataaagatgcagatggtggcgaagttgacgtaacaattacggatcatgatgatttcacacttgataacggatacttcgaagaagatacatcagacagcgattcagactcagatagtgactcagacagcgactcagactcagacagcgactcagactcagacagtgattcagattcagacagcgactcagattcagatagcgactcagattcggacagcgattcagactcagatagcgactcagattcagatagcgattcagactcagacagcgactcagattcagatagcgattcggactcagacagcgattcagactcagatagcgactcagactcagacagcgactcagattcagatagcgattcggactcagatagcgactcagattcagacagcgattcagactcagatagcgactcagattcagacagcgattcagactcagatagcgactcagactcagacagtgattcagattcagacagcgactcagactcagatagcgactcagattcggacagcgactcagactctgatagcgactcagactcagacagtgattcagacagcgattcagactcggatgcaggaaaacatacacctgttaaaccaatgagtactactaaagaccatcacaataaagcaaaagcattaccagaaacaggtagtgaaaataacggctcaaataacgcaacgttatttggtggattatttgcagcattaggttcattattgttattcggtcgtcgcaaaaaacaaaacaaataatacaatatgacccaggtccttgtggcctggtttttttataattacacatgcaatagatgtatttttcatataaaataaacaataaagatacggaataaaacttatatgaggcgataatatgaattacattttaggaacaattttagaaagtaaaattacaggtgtagaaaaagcgcaaataaatagattgaagttgttcaaacaacacggcatatcttcaaaatgtgtatatgttaaatggaatccttattcatacacatatgcgaagcaacatcagattgaaaatgatgtatttacaatgtatgactattttcaaaaagcaatcaattataaaaagacaaagcaagttaactggatacagtattgggaaaagtcatgtaggtacacattgaaatttgtggaaaattcaaatgatgtcagaatatatgatgaagagcaatttgtaatgtatgctcattttttagataaacagtatcatcaattaaattatgtgaattattttgatcataaaagaagaaaagtaaaacgcgaattgtatgatggaagaggctttttaagttgttctcgaattttaggtgaaggacaacggattgtactcgaaaattactatacacctaatggggaaatcgtcatccaaaaatattttgacgatataaaagggaaaaacacgctcacaaaggttatcttaaatgaagaccagcatcaacaattttttgatacagaagatgaattagttcaatattttctccatcaattatgtaaaaataatgatcaaatcatattagatcgtcctcatgaattaggaaatgttatagcgggattaaatcaaagtattccagttattgttgtgctccatagtacacatttatccggtgccggtaatggtataaaaagtttttataaaacagtgtttaataatttaacacgttataaagcgattgttgtatcaacagaaaagcaatgccaagatatttcacaatatattgaaaataaaataccagttatcaatattccggttggctacgtggcaaatttaaagtatcaatttgacatcaatcaaaaggagaaaaatcatatcatatcaattgctcgcctcgttgaaaataaacaaattaaacatcaaattgaagtaatcaagcaattagtaacaaaacatcccaatattcaattgaatatttatggacatggaaatggtttgtcagaatatcgacaacttgtagaagattatcatttatcggaacatgttaaatttcatggttttaagacgcatattaatgaagagattgctaaagcagaactgatgttatcgacaagtaaaatggaaggttttggcttagcaattttagagtcgctttcagtaggtacaccagtgatcagttatgatgtagattatggtccatcagaactgattcaagatggatttaatggctatttagtacctcaaggtgacatcaatcaaatggttgaaaaggtcgaccaattactaaataatactcaaaaattgcaacagttttcaattaatagcatagaatctgcacaacagtacaatgcaactactatcagtacaaagtggcaaaatattttaaactaagtcaaaagaaaaaagcattttcctagaatcatctatttaacaaacctcgttcatacgaacttacatgtttagttaaatgacataggaaaatgctatttttgtaaaaataaaggtaaagtacatttatataagacgaacaaattggtcccattgtttaattaacgacgctttactatattgttgtgcttttgccaaactaccttttgacagtcgttgctgtacttcaggatgatcaatcacatattttactttatcaaatagggcatcttcatcatttttagtaattaaataaccattgaaatctgaagtaatcagttcgttaggtccatatttaatatcataactaataactggaacaccatgtgctaaagattcaagtagcgctaaagagaaaccttccatgttacttgttattaaactcaaataggcatcgctatattcttggtctagattgcttaaaaagccgcgtaagtaaacatgattttccaatccatatttttgtatcaattcatttaattttttactttcagaaccaaaaccatacatatgaagctctatttttgggacatacgatactaagcgtttaattaattcaatttgttgatgtaattgtttttcaggtgaataacgagcaacggaaattaatttaacactgcgctgatctaatgtttggactggtgtatcaattgtttcactatagccgacaggaatattaacaactggaatagtatggttaatacgtttttcaacatctaatttttgctgctcagtagaaacgataattgcacgatatcgagataaattttcaaacatcgctttatatacatttttaaatggcgatgaatctaatgcatcaatatttttaatgtgtgtactgtgaagcacagctactactgggattgactcaggcgttaagttgaaaataggtgctgtgtacacattacgatcactgaaaaataaatccccatgttgatatagttgtttaatgaaaaatgcgcctaattccgtttcattattaaagaaatattgtttgttagcatagtaaacaataattttttgtacttctggtttgccatccttgtaagaaaaatacttttctaattttgtgtcaccttctggattatagaaaaattcacataatgtttgttgtttatcaacaagaatcctactacaacttaaaaagccacgcacatcataaaaatcacgttttacttttcgtctttgactatcaaaatgatttacataatctaatatacgatatttaggatcttgaaaatgggcatacattaagaaacgctcttgatcatatattctaaagtcatgactattttcaacatgttttaaagtataatgacattcatcagtccaatacgacaaccagtcaaatggttcattgcgttctaaatatgttgcttcttggaagaaatcatacatattaatatagtcagaactagtaatataattttgggcatttctatataaatatctattccatgacagaaatacacattgcgctggtcttcccatttctttaaataaatttaaacgattaataattgctttctctatcccagttaaattaacacctaaactattacctacaaaataattcatttacaacaccacttatatctattttttataattatatcacataatatttaattacttcttttaactggaagatgtgtttatttataaaacaacaaattttgatatttataatgatagtagttattcaatcaactacgaccaatatatcattgtagagcttaggatattgatttatgactcaggcacatcaaatgagaagatttataaaagagatatacaactctagaaggtataataaaaacgcgcaactaatgttacgcgtttgaattaatcatatgatattatttgcgatactttaatttagcgaaagcatcatgttgatggatagactcttcattacgacattcgatatcgaaaccgtctaaccaatcaaattcaactaagtccgcggcaattaaacgaattaagtcttcgacaaaacgtggattttcatatgcacgctctgtcacacgtttttcatcaggacgttttaaaatagggtatagaattgaacttgcattagcttccattgcatctaaaattttatttttatagtcatcaactatgtcttgatctttattaatatatgttttaacagtgacaacaccacgttggttgtgcgctgaatactcacttatttcttttgaacaagggcatagcgttgtgacagttgcttcaatagtaagttctttacgtgtaactttatcaccgtcaattgctaatccataagtgacatcggcattaccaactgctttaatatttgtggttggactatagcgatcaaagaaccatttcccagaaacatcaacgcctgccgcattttgtttcatattcgtttgtaaagtgcgtaacacctgataaagtgtattaaattcaagttcaataccattatcatagtgcttttcaacactttcgattatacggctcatattaatacctttttcgtcttttgttaaacttgttgaaaaactaaatgtgccagctgtttgatactggtcaacaagtacagggtacactaagtttttaataccaacttcttctatttcaaataaaaaatctttatgtgtactttgtaaatctgtcatttcgttcttagtagtaggtttcgtgccttcaataggatctacggaaccaaagtgtttccaacgaccttctcgtgtcgataaatcaaattcagtcatttttttcctccgttaagatttaaagtgatatgtccaatatggttcgactgttaaaaagctgtgttgtttaccatcgatttcaggacttgctaattgttttaaaaatggacctgtttgagaagcatgtgcttcaaatgccttaattttaagttctttaaaatctgtaatatcattttgaatatcaggttctccaagagcttcggttgcatcattactgaacgcaactaaagttaaacgagggcgttcttctttaggcatgcgttcaaccgttcgaattacagcgtctgctgttgcttcgtgatcaggatgtactgcatatccaggataaaatgaaataatcaatgatggatttgtatcatcgattaaagatttaatcataccatctatatgttcatagggttcaaattcgacagttttgtcacgtaaacccatttttcttaaatcagtaataccgataactttacaagcttcttctagttcacgctcacgaatacttggtaatgattcgcgtgttgcaaatgggggattacctaaatttctgcccatttgtcctagggttaaacatgcatatgttacaggtatgcctttttggatataatttgctaatgtgcctgcagatgagaaggtttcatcatcaggatgtggaaatattactaatacatgtctttcgtcagtcatgttgatgcctcctctataaattaaatggtcgctcactaatttgaagtgctgcagcgagttgaccttcgtaattaaaacctgcaattaaaaattcatcatgctcattgacctcaaaatgcgttagaccttgtacataaacccaaccaccatttgatagtttaagaccaatgcgataaggttctttattaccaccttttagttgtgcatgcgtatatgttatttgtatgtttcttaaaaaagtaccagcattaaaaacacgttgatcgaaatggttcgcataggccccatttgtcgtttcaacatgcagatacacaggtttatgttcaaaagaagcaagtaaatctataacttcttgttctttaattggttccaacacgttcactccttacactatcaatgtgtttatctttctattttactaaaaactattcgataattgtatacgattgctcaattatttataaattaattttcatgaagggtaattactcaggattacgtaatcatacagcattagttttttacttttaaaaatcaaaaatttgttggaatttgaaaagtgttaaacattaaaaatgatgctatattaatggtgtatgaatgaattcataagtttttaaaatgtattaaatttgtggaggcatgtaaacaatgaaagtattaaacttaggatcgaaaaaacaagcatcattctatgttgcatgtgagttatataaagagatggcatttaatcagcactgtaaactaggtttagcaactggtggtacaatgacagatttgtatgaacaacttgttaagttgttaaataaaaatcagttaaacgtagacaatgtatccacgtttaatttagacgaatatgtaggtttaaccgcatcacatccgcaaagttatcactattatatggatgacatgcttttcaaacaatatccttattttaatagaaagaacattcatattccaaatggagatgccgatgatatgaatgcggaagcgtcaaaatataatgacgttttagaacaacaaggtcaacgtgatattcaaattttaggtattggtgaaaatggtcatattggatttaatgaacctggtacgccgtttgatagcgttactcatatcgttgatttgactgaaagtactattaaggctaatagtcgatattttaaaaacgaagatgatgttccaaagcaagccatttcgatgggacttgctaatattcttcaagccaaacgtatcattttactcgcatttggtgaaaagaaacgtgctgctattacacatttattaaatcaggaaatttctgttgatgttccagccacattacttcacaaacacccgaatgttgagatatatttagacgacgaagcttgcccgaaaaatgttgcgaaaattcatgtcgatgaaatggattgattgcaatgtttaattaagaaatgcctcgggaaaggttccaatagaaagataaaaagcattggaaggatgatttttagtggaattacaattagcaattgatttattaaacaaagaagacgcggctgagttagcaaataaagtaaaagattatgtagatatcgtagaaatcggtacgccaatcatttacaacgaaggtttaccagcagttaaacatatggcagacaacattagtaatgtaaaagtattagcagacatgaaaattatggatgcagctgattatgaagttagccaagcaattaaatttggcgcggatgtaattacaatactaggtgttgcagaagatgcatcaattaaagcagctattgaagaagctcataaaaataataaacaattactagttgatatgattgctgttcaagatttagaaaaacgtgcaaaagaactagatgaaatgggtgctgattatattgcagtacacactggttatgatttacaagcagaagggcaatcaccattagaaagtttaagaaccgttaaatctgttattaaaaattctaaagttgcagtagcaggtggaattaaaccagatacaattaaagatattgtcgctgaaagtcctgatcttgttattgttggtggcggaatcgcaaatgcagatgatccagtagaagctgcgaaacaatgtcgcgctgcaatcgaaggtaagtaatatggctaaatttagtgactatcaattaattctagatgaattaaagatgactttgtcacatgttgaagcggatgagttttcaacttttgcatccaaaatactacatgctgaacatatatttgtagctggcaaaggacgttcaggattcgtggcgaatagttttgcaatgcgcttaaatcagctcggcaaacaggcacatgttgttggagaatcaacgacacctgcgattaagtcgaatgatgtatttgtaattatctctggttcaggttccacggaacatttaagattattagcagacaaagcaaaatcagtaggtgctgacatcgtattaattactacaaataaagattctgcaataggcaatctagctgggacgaacatcgttttgcctgcaggtacaaaatatgatgaacaaggctcggcacaaccattaggaagtttgtttgaacaagcatctcaattatttttagatagtgttgtaatgggattgatgactgaaatgaatgttacggaacaaacgatgcaacaaaatcatgctaatttagaataaaataaagatagtcgataatatgatgcctaggcagaaatattatcgattatttttttatttaaataataaattatagtataatatcaataataaacgaataggggtgttaatattgaagtttgacaattatatttttgattttgatggtacgttggcagacacgaaaaaatgtggtgaagtagcaacacaaagtgcatttaaagcatgtggcttaacggaaccatcatctaaagaaataacgcattatatgggaatacctattgaagaatcatttttaaaattagcagaccgaccattagatgaagcagcattagcaaagttaatcgatacatttagacatacatatcaatctattgaaaaggactatatttatgaatttgcgggtataactgaagccattacaagtttgtataaccaagggaaaaaacttttcgtggtgtctagtaagaagagtgatgtattagaaagaaatttatcggctattggattaaatcacttgattaccgaagctgttggatccgatcaagtaagtgcatataaaccaaatcctgaaggcatacacacaattgtgcaacgctacaatttaaatagccaacaaacggtgtatattggtgattcaacgtttgatgttgagatggcacaacgtgctggtatgcaatctgcagctgtcacttggggtgcacatgatgcaaggtcattacttcattcaaatccggattttattattaatgatccatcagaaattaataccgtattataaaacttgttaaaacagagaataccatggttaaaatgcatattcataaatattagattatacttagaaatatttcgctttagattaggaatttaaaataaatatttattaaacattatgaatttttaaagagtaatgtctgactcgttgataatttatttttgtaaaaataaattaaagtaatgacaaagttattgaagtaaattgagtataaacatttaaatacgatgtcgaaaatggcgatagcatatcacttacatgaagttgtgtgctatcgctatttttagttataattccaaaaagttaatcgttcgatgatttaagaattattattgtttaattcaaatgtatgagggtataaaatcattgaatttaattcgataaagcgaaatttttgaacaaacatacttttgtatttatataaaagtttaaattcttataaatttgacaaaactaattaactccgtataattatgaaacatacaagagggagtgtatgaattcatggattttaataaagagaatattaacatggtggatgcaaagaaagctaaaaaaaccgttgttgcaaccggtatcggtaatgcaatggaatggttcgattttggtgtctatgcatatacaactgcgtacattggagcgaacttcttctctccagtagagaatgcagacattcgacaaatgttgactttcgcagcattagccattgcgtttttattaagaccaattggtggtgtcgtatttggtattattggtgacaaatatggacgtaaagttgtattaacatctacaattattttaatggcattttcaacattaaccattggattattgccaagctatgatcaaattggactttgggcaccaatactattattgcttgcaagagtactacaagggttttcaacaggtggagagtatgcgggggcaatgacatatgttgccgaatcatctccagataagcgtcgtaactcattaggtagtggactagaaattgggacattatcaggttacatagctgcttcaattatgattgctgtattaacattctttttaacagatgaacaaatggcatcatttggttggagaatcccattcttactcggtttattcctaggattattcggcttatatttacgtcgtaagctggaagaatcaccagttttcgaaaatgatgttgcaacacaaccagaaagagataacattaactttttacaaatcatcagattttattacaaagatatatttgtatgttttgtagctgttgtattcttcaatgttacaaactatatggtaactgcatatttaccaacctatttagaacaagttattaaattagatgcaacgacaacaagtgtattaattacttgtgtcatggcaataatgattccattagcattaatgtttggtaagttagcggataaaataggtgaaaagaaagtatttctaattggtactggtgggctaacattattcagtatcatcgcatttatgttattacattcacaatcatttgttgtaatagtaatcggtatatttatattaggatttttcttatcaacttacgaagcgacaatgccagggtcgttaccaacgatgttttacagtcatataagatatcgaactttatcagtaacatttaatatctctgtttcgatatttggtggtacgacgccattagttgcaacatggttagttacgaaaactggagatccattagcacctgcgtattatttaacagcaatcagtgttattggctttttagttattacattcttacatttaagtacagcaggaaaatctctaaaaggttcgtatccaaatgtagataacgagcaagatagagcttattatgcagaacatccaaaagaagcattatggtgggttaaagaacgtaagaattagagattttaataaaaagtataaatcaatcgtatataagcactttaaagctagtaggttctgctaactttaaagtgctttttaaattgagaactgtaattagccgtaataaagtttttgtatatacataaacccccactgcaatgattatcgcaatgggggaaagaggggacttaaagcatatgtttagctttgaatacttaaaattctcttgctattgaaatgttaggatgtaaatatgtcttagagtattttgtccaacgcaattaatattgagactctaaccttcaatattattatagagaacacaaacttaaatagattgggtgacttatttgtgtcagttattgcgattgcgataacttcttttctctatatacatatagtaacgtcttatctaataaaaaacatggtactacagtatcaaatttatctagggcttaagtttgatttttataataggcaggtttacctgataaaaatacttattcattatataatgttaacaatatgtattttaaagtttacattgagtgagggatattgatgaacgtaattttagaacagttgaaaacacatactcaaaataaacctaatgacatagcattacatatcgatgatgaaacaattacatatagtcaactaaatgcccgcatcactagcgcagttgaatctttgcagaaatattcacttaaccctgtcgttgctattaatatgaaatcaccggtgcaaagtattatttgttatttagctttgcatcgtttacataaagtgcctatgatgatggaaggtaaatggcaaagtactatacatcgtcaattgattgaaaaatatggtattaaagatgtaattggagatacaggtctcatgcagaatatagactcaccgatgtttattgattcaacgcaattacagcactaccccaatttattacatattggttttacttcagggacaactggactgccaaaagcatattatcgtgatgaagattcatggttggcttcttttgaagttaatgaaatgttgatgttaaaaaatgaaaatgcaatagcagcccctggaccactatcgcactcgttaacattatatgcgttattgtttgctttaagttccggtcgtacttttataggacagaccacttttcatcctgaaaagttacttaatcaatgtcataaaatatcatcatacaaagttgctatgtttcttgttccaacgatgattaaatcattattgttagtttacaacaatgaacatacaatccaatcattttttagcagtggagataagctgcattcttctatttttaaaaagataaaaaatcaagcaaatgacataaatttgattgaattttttggtacatcggaaaccagttttatcagctataacttgaatcagcaagcaccagttgaatcagtaggtgtgctatttccaaatgtggaattgaaaacaacgaatcacgatcacaatggtataggaactatttgtataaaaagtaatatgatgtttagtggctatgtaagtgaacaatgtataaataatgatgaatggtttgttactaatgataatggctatgtaaaagagcagtatttatatttaacgggacgtcaacaggatatgttaattattggtggtcaaaatatatatccagcacatgttgaacgccttttaacgcaatcttcgagcattgatgaagcaattatcatcggtattccaaatgagcgttttggtcaaataggcgtattgctttattctggtgatgtgacacttacacataaaaatgtaaaacaatttttaaaaaagaaagtgaaacgctatgaaattccatcgatgattcatcatgtagaaaagatgtattacactgcaagtggtaaaattgctagagaaaaaatgatgtcgatgtatttgagaggtgaattataatatgaatcaagcagtcatagttgcagctaaacgaactgcatttgggaaatatggtggcactttaaaacatttagagccagaacaattgcttaaacctttattccaacattttaaagagaagtatccagaggtaatatctaaaatagatgatgtagttttaggtaatgttgttgggaatggtggcaatattgcaagaaaagcattgcttgaagcggggcttaaagattcaatacctggcgtcacaatcgatcggcaatgtgggtctggacttgaaagtgttcaatatgcatgtcgcatgatccaagccggagctggcaaggtatatattgcaggtggtgttgaaagtacaagtcgagcaccttggaaaatcaaacgaccgcattctgtgtacgaaacagcattacctgagttttatgagcgtgcatcatttgcacctgaaatgagcgacccatcaatgattcaaggtgctgaaaatgtggccaagatgtatgatgtttcaagagaattacaagatgaatttgcttatcgaagtcatcaattgacagcggaaaatgtaaagaatggaaatatttctcaggaaatattacctataaccgttaaaggagaaatattcaacactgatgaaagtctaaaatcacatattccgaaagataactttggccgatttaagcccgtgatcaaaggtgggaccgttaccgctgcgaatagttgtatgaaaaatgatggtgcagttttattgcttattatggaaaaagatatggcatacgaattaggtttcgagcatggtttattatttaaagatggtgttacggtaggtgttgattctaattttcctggcattggtccagtaccagccatttccaacttactaaaaagaaatcaattaacgatagaaaatattgaagtcattgaaattaacgaagcgttcagtgcacaggtagttgcctgccaacaagctttaaatatttcaaatacgcaattaaatatatggggtggtgcattagcatcaggtcatccatacggtgcaagcggtgcccaattagtgactcgattattttatatgtttgacaaagagactatgattgcatctatggggatagggggaggtctaggaaatgcagcattatttactcgattctaaccagcgattaaatgtgtcattttctaaggatagtgtggctgcatattatcagtgttttaaccaaccttatagaaaagaagtaccaccattaatgtgtgcgtcattatggccaaaatttgatttatttaaaaaatatgcaaatagcgaactgattttaacaaaatcagcaattaatcaaactcaaaagatagaagtagacacaatatatgtagggcatttagaagatattgaatgccgacagactcgcaatatcacacgttatacaatggctttaacattaactaaaaatgatcaacatgtcataacggttacacaaacttttattaaggcgatgaagtagagatggagtttaatgagatatggataaatgaatatttggcgctcgtaaatgatgataatccaatacataatgagattgtgccaggacaattagtgagtcaaatgatgctgatggctatgtcattagagacaaaccagtgtcaaattaactacgttaaacctattttaataaatgaaaatatcgaattcattgaacaacacgaacacgaaattatagcaattaatgacgatggagagattaaaataaaaatttctttgagcacaaaaaaataaccgatattagctgcatgaacgcatattaattaggagatgaaaggacagctaatatcagttatgtattgttattattattgggaacagagatgaatataggttacgtttctttctttgcacggggatgcattaatctaaaataataataacaactatatcaatgtttaataaattctggattattggaacgattagtcaatttaactaactttcatatgatctatatcgtcttgtaataaagagagcaatttgaatatttcagtatcactaaatgaatcgtcacatttaattgaaacatgctgaaacgttttggttataatttcataaactggtgcgccttcatggtgatactgtcgataaataatcataacctatattacctcctttgctactctatggttatattataaataacatttttatgtgtgacatcaaccttaagtatcaactttttatcagacatagaacgtatgatttactaagactatttatgtataaaagttctaaataaatatatatttatagagtcgcctggcagtcatttgggaaatataacatatatgattagagaggcatctatcgcaaaagaatgataatgatagaggtattgagcatatagatgagtttaagttcatcttgaaaataaagggttatttagtcatagatgtagatgtataggaaatatttgtatgtattgttcgatatgtatgaaattttcaataaaagctaataacgcttatatgtaactttcaaatttaaattatatacagagcatgatgattataaaaaaataaccacatcacataaattgagttcatacccaatttaagtggtgtggctaataatgttgatttatagatgaaccgcctaatcgttaaacctctgttacttcaacatcgatatgttcaatacggttgtatgcaccgtgatccacaggaccaacaaaatcattcattttccaaccgtttttaatagcagaagcgacgaaagctttcgcgctaatcacagcttctttcggtgacttaccgttagctaaatatgcagttgttgccgcagcaaatgtacaaccagcaccatggttataactttgttggaacatgtctgttgttagttgataaaatgtttgaccatcatagtataagtcatacgatttatcttgatctaaagctttgccacctttaatgatgacatgctgtgcgcctttatcaaagataattgttgcagcctttttcatatcttcaattgaatttaatttacctaatcctgataattgacccgcttcaaataagtttggtgtcactaccgttgctttaggtagtaaatatttaatcatcgcctcagtatttccaggattaagcacttcatcttcgcctttacaaaccatgacaggatctactacaaaatattgtgcattagatgcctcatatacttctccagcacgtttgattatctcctcagtacctaacatacctgttttaatagcatcaggtccgattgataaagccgtttcaagttgtttttcaaatacatccattggtaatggtgtaacatcgtgtgaccatgtatctttatccatagtaacgatggcagttaaagcgaccatgccatacgtatctaattcttggaacgttttcaaatctgcttgcatacctgcgccagcacttgtgtcagaaccggcaattgttaaaactttctttaaagccattgagcttcactcctacataataatattgtattcatcatatcatttttaacctaattgaaaaatattaagcattcaatatttgatgattgttgaaatgaatcattcatactattgtaacttttgaaaatgtcattcactttagataagtgtgatatgttaaaatatgtcctgaggtgagattgaatggaatggtcgcaaatttttcatgacataacaacgaaacatgactttaaagctatgcatgattttttagaaaaagaatattcgactgcaatcgtataccctgatagggaaaatatatatcaagcgtttgatttaacaccgtttgaaaatatcaaagttgttatattaggacaagacccgtatcatggtccaaaccaagcacatggattagcattttcagtgcaacctaacgcaaaattccctccatctttacgtaatatgtataaagaattagcagatgatattggatgcgttagacaaacaccgcatttacaagattgggcaagagaaggcgtcttgttattgaatacagttttaaccgtaagacagggtgaagcaaattctcatcgtgatattggttgggaaacatttactgatgaaattattaaagcagtgtctgattataaagaacatgttgtctttattttgtgggggaaacctgcacagcaaaaaataaagcttatcgatacatctaaacattgtattataaaatcagtgcatcctagtccactgtctgcatatagaggattctttggatcaaaaccgtattccaaagcgaatgcctatttagagtcagtaggaaaatcaccaattaattggtgtgaaagtgaggcgtagatgttgaatagagaaactttaatagcacgaattgagcaagaattagtacaagcagagcaggcacagcatgaccatgactttgaaaaacatatgtatgccatacatatattaacatctttatatgcttcaacatcaaatacaccacatattggtgaacaacaaatgaatcgtcgtattgctaaccataatcaaatgccacaatcacaaataacgcagccaactcatcaagtgacagttgctgaaattgaagcgatgggtggtaaagtaaatacgcattcagcacatcatcataataagtcatattcacaaccttcaaaccaacaacaaagattagcgacagatgatgacattggcaatggtgaatccatatttgatttttaaaaagcaacaatgaaacataattacttaatagcttgttaagtatgtaggttaataatcaagacgcatatacttttattcgagtgttcggatttaaacatttattaatactgaattatataaggagaggtagcaatgaaattatttattattttaggtgcattaaacgcgatgatggctgtcggtacaggtgcatttggtgcgcatggtttacaaggaaaaataagtgatcactatttatcagtatgggaaaaagcaacgacgtatcaaatgtaccatggcttagcattattaattataggtgtaattagtggtacaacttcaatcaatgttaactgggctggctggttaatatttgctggtattattttctttagtggatcattatatattttagtattaactcaaattaaagttttaggtgcgattacgccaattggtggcgtattgttcatcattggatggataatgttaatcattgcgacattcaaatttgctggttaaattttaaaactttagattacctatgtaactaaacattaaatttttaataaaaataatcaagaaaaagagttacaaactcatcttttgggtatagaataccttcgaggtgagtttttatttatggaaaaaaagaataagcaaatagatagaggcgatttaaaacaaaacctatctgaaaagtttgtatgggcgattgcatatggttcatgtatcggatggggcgcattcatcttaccaggagactggattaagcagtcaggtccgattgcagcatcaattggtatagttattggtgcattattaatgatattaattgcggttagttatggcgcattagtagagagatttccagtatcagggggcgcgtttgcctttagtttcttaagtttcggcagatatgtgagtttcttctcatcatggtttttaacttttggttatgtctgtgtcgttgctttaaatgcgaccgcattcagtttactagttaaattcttattgccagatgtcttaaataatgggaaactatacaccattgcgggctgggacgtttatattacggaaatcattattgcgaccgtattactacttgtattcatgctagtaacgattcgtggcgcaagtgtatctggatcattacaatattatttctgtgtggcgatggtaatcgtcgtattattgatgttctttggttcattctttggtaataattttgcacttgaaaatttacaaccgttagctgaacctagcaaaggatggttagtgtctattgtggttattgtatccgtggcaccatgggcatatgttggatttgataatattccacaaacagcagaagagtttaactttgcaccaaacaagacatttaagcttatcgtgtacagtttattagcagcatcattaacttatgttgtcatgattttatacactggttggttatcaacaagtcatcaaagtttaaatgggcagttgtggttaacaggtgctgttacacaaacagcatttggttatattggattaggtgtattagcaattgcaattatgatgggtatatttactggtttaaatggattcttgatgagttcaagtcgcttgttattttctatgggacgttcaggtattatgccaacaatgtttagtaaattacatagtaaatacaaaacaccatatgtcgcaatcatattcctagtaggagtgtcgttaattgcaccttggctaggaagaactgcattgacttggattgtagatatgtcatctactggtgtatccattgcctactttattacatgtttgtctgcagcgaaattattcagttataacaaacaaagtaatacgtatgcaccggtttacaaaacgtttgctattatcggctcatttgtatcattcattttcttagcgttgttattagtgccaggttctcctgcagcactgactgcaccgtcttatattgcattacttggatggttaatcatcggtttaatattctttgtgattcgatatcctaaattgaaaaatatggataatgatgaattaagtcgcttgattttaaatagaagtgaaaatgaagttgatgatatgattgaagaacctgaaaaagaaaaaactaaataataaaagaatcgcacaataaaccttcttcattcggaggcgtatcgtgcgattttttgtattataaattgacatttaagacgaggcagctgaaccttatatataattgctaagagttagggctgagccatttctaacaaatatttataatcgtttaaaagatttcacgaacccagaaacaattaatttggaaatttggtcggcgaataataaacctaatgcgatggcgcctgcaataagtgtaacctctagcatggtattgattgctgtactgaaatttaataagactaaattttttgtagcatcgtatgctaagccaccaggtactaatggaatgatacccgttaccataaaaatgatggcaggttctttttgtttacgagccatataatgacttaacaagcctaatgctaaactaccaaagaaactagagtatatagtgtgcacattaaagccgttgaagaataaggtgtaaaccatccatccacacgtaccaacgaaaccacatgatagatataattttctaggtgcatcaaaaatgacgcagaagaacattgaagctaaaaagctaaagataaagtttaagatccaaaacatagtctgatactcctatactaaaattaatacgctaccaacgccagcaccgatgccaaacgcagtaaccaatgcttctaatgatttcgttgtgaacatcaacatgtgtccaccaaataaatcttgtattgcgtttgttattaatacaccaggaacaataggcatgactgccgcaatgataatagttgccaagtcacctgttggaataagtgtatgtccaataacggcgataatcccaataactaatgaaccaatgaattctgggataaactgtgcgtgtaacttacgatctaaaatctcagtgactaggtatcctagactacctgctaatatcgcagttaaaacatcaatcaatctaccaccttgtaaatataagaaactcattgcaatcattgctgcagcaaaacctttaaagggaagactgctgtcacgcttagcaacatatattttttcaagttgcgtttttgcttcggctaaagaaatttcattgtttgtaatttgacgcgaaattttattagcttgagaaatttttattaagtttgtatctcgagaggtaattctaaatattctaggaaacgattccgaatgtaacgtaaactggatgacagtgtttgtaacaaagctgttactttcactgtaaccaagtttttttgcaatacgtgtcatggtatcttctacacgcgtaccttctgcaccagattctaatagtatgcgagcagcaagcatgacaacgtctttgataagtacctcttgtttgtattcttctgaatttatgtccatttcatcaccattgtttataagaatttaatactcattatagtttatacactataaaataaccacatgagctttttgataagttgttattgattttaaaaaactaatatttgatactattgtaataataatcatcggaatttttagtagttaaaattctcttgaagtataaaaaggaaaaattattgaaaaaaattcgacaaaaatatgtttcaaatatttcaaataggttaaaataatattagttaaccattacaaaaattgtatagagtagcgactgtataatttctattgaggttaacgtttatatgtagtgatagtagttaaagttctcccaaggaagactactcgggtacactttgctatgagcaaagtgtactttgttattgataatacattagcacatatatataagtttaaacatacagatttcaactatttaccaaatcacgtcttatgtatacgggaatatactgaagataaacgaaaaattccaagcttaaaccgataagcttggaatttttttattaatttataaacgtaccaatgtattaagaaatcgcaaagaattgatcgaattcgtttgtgttaataatatgtcctacaaagaaactaccgaattcaccgtatcgtgctgttgtttcatcaaagcgcatttcgtatacaatttttttgaattgtaatacgtcatctgagaacaatgttacgccccattcgaaatcatcaaaccctacagaaccagtaataaattgtttgattttgccagcatattttctaccaatcataccatggtcatacattaatttttggcgttcttccatagttaacatgtaccagttataagtttcattacgacgtttgttcattggatagaaacaaatataatcagaatgtggtaattctgggtataatcttgctttgatatgagggttctcataaggatcttcatcagatttaccagctaaataattgctcaattcaatgactgatacatatgaatatgtagggattaggaagtcagcaatgcgcaatttgttaaattcattttcaatatgatttaaagacttcatttcaggacgtaagaaccataataacaaatctgctttttgaccagttatattataaatagcttgatcaccagattttgatgatcttacagttgctgtattttctaaaaatgattgaaattcagtgacaagtgcatcgcgttcgtcctttggaactatacgtaatgatgcccaatcaactgcataaaataaatgtagactataccaaccatctaatgtttcggctgcttgactcatgtttatcgctccttttcaaaaatcatcagttctttataaattttatcataaagcaaaggggtaacgataaaattatgattacaaattggtgacgtggcattatgaaataaaatggcgtataattataccgtgaatgattaataagatttatattacaggaggacattatggctgatttattaaatgtattaaaagacaaactttctggtaaaaacgttaaaatcgtattacctgaaggagaggacgaacgtgttctaacagctgcaacacaattacaagcaacagattatgttacaccaatcgtgttaggtgatgagactaaggttcaatctttagcgcaaaaacttgatcttgatatttctaatattgaattaattaatcctgcgacaagtgaattgaaagctgaattagttcaatcatttgttgaacgacgtaaaggtaaagcgactgaagaacaagcacaagaattattaaacaatgtgaactacttcggtacaatgcttgtttatgctggtaaagcagatggtttagttagtggtgcagcacattcaacaggcgacactgtgcgtccagctttacaaatcatcaaaacgaaaccaggtgtatcaagaacatcaggtatcttctttatgattaaaggtgatgaacaatacatctttggtgattgtgcaatcaatccagaacttgattcacaaggacttgcagaaattgcagtagaaagtgcaaaatcagcattaagctttggcatggatccaaaagttgcaatgttaagcttttcaacaaaagggtctgctaaatcagacgacgtgacaaaagttcaagaagctgtcaaattagcacaacaaaaagctgaagaagaaaaattagaagcaatcattgatggcgaattccaatttgatgctgcgattgtaccaggtgttgctgagaaaaaagcgccaggtgctaaattacaaggtgatgcaaatgtctttgtattcccaagtttagaagctggtaatattggttacaaaattgcacaacgtttaggtggatatgatgcagttggtccagtattacaaggtttaaattctccagtaaatgacttatcacgtggctgctcaattgaagatgtatacaatctttcaattattacagcagcgcaagccttacaataacgatggatttagcgagtaaatattttaatggcgtcaactggcgatatatcgatcattcttctggattagaacctatgcaatctttcgcattcgatgatacattttgcgaaagtgtgggcaaagatatatcagataatgttgtgcgtacttggattcatcaacatactgttattcttggtattcatgattcaagattgccgtttttaaaagatggcattgattatttaacgaatgagattggttataatgccattgttagaaattctggtggcttaggtgtcgttctagatcaaggtgtattaaatatatcgctgatgttcaaaggacaaacagaaacaacgattgatgaagcgtttactgtgatgtacctcttaattagcaaaatgttcgaaaatgagaatgttgatattgatacgatggaaattgaacattcttattgcccaggaaaatttgacttaagtatcgatggtaagaaatttgcaggcatatcgcaacgaagagttagaggcggtattgctgtacaaatttatctttgtgttgaaggctctggttcagaacgtgcattgatgatgcaaacattttatgaacatgctttaaaaggtgaagtgactaaatttaaatatcctgaaattgaaccatcttgtatggcctcattagagacattgcttaacaaaacgattactgttcaagatgtaatgtttttactattatatgcaatcaaagatcttggcggtgtattaaatatgacgccaattactcaagaagaatggcaaagatacgatacgtattttgataaaatgattgaaagaaacaagaaaatgatagatcaaatgcaatagttaaatatttaacagcccctttcaagttatcgtttggggctgttatttttgaaagtatccataaaaagcataaatatgttattgacctaatatttaaattgaacatcattaaattaaaagtaatgatatgatggaaataataaatttaataagaaaatttcatgttttacgtattaaatagattgagaatagggtatatataatgcgtatgactatgaaagaaacgaccttctattgaaatgttctaatactttagtagtaaatctatatattccaattattatttgtagtattatagttagggtggaaaattataaattgtagggctattttataaaaagataaagaatctgaaatatcactcgataagatttaaactttgaagtaaacgaaagttagttttatactaatcaagttaagtcaaatataaattcaaaataaagattatacataatatgaataatgtgagataaagactgcaatgaaatttaacgcgaatgcgtatgcaacttagaatatgatgtcttttactaataaataaaaataatgaatcaagtataggataaatataaaaggtgatattgacatgacaagaaaaggatatggggaatcgacaggtaagattattttaataggagaacatgctgttacatttggagagcctgctattgcagtaccgtttaacgcaggtaaaatcaaagttttaatagaagccttagagagcgggaactattcgtctattaaaagcgatgtttacgatggtatgttatatgatgcgcctgaccatcttaagtctttggtgaaccgttttgtagaattaaataatattacagagccgctagcagtaacgatccaaacgaatttaccaccatcacgtggattaggatcgagtgcagctgtcgcggttgcttttgttcgtgcaagttatgattttttagggaaatcattaacgaaagaagaactcattgaaaaggctaattgggcagagcaaattgcacatggtaaaccaagtggtattgatacgcaaacgattgtatcaggcaaaccagtttggttccaaaaaggtcatgctgaaacgttgaaaacgttaagtttagacggctatatggttgttatagatactggtgtgaaaggttcaacaagacaagcagtagaagatgttcataaactttgtgaggaccctcagtacatgtcacatgtaaaacatatcggtaagttagttttacgtgcgagtgatgtgattgaacatcataactttgaagccttagcggatatttttaatgaatgtcatgcggatttaaaggcgttgacagttagtcatgataaaatagaacaattaatgaaaattggtaaagaaaatggtgcgattgctggaaaacttactggcgctggtcgtggtggaagtatgttattgcttgccaaagatttaccaacagcgaaaaatattgtaaaagctgtagaaaaagctggtgcagcacatacttggattgagaatttaggaggttaatgcgttgattaaaagtggcaaagcacgtgcacatacgaatattgcacttataaaatattggggtaaaaaagatgaagcactaatcattccaatgaataatagcatatctgttacattagaaaaattttacactgaaacgaaagtcacttttaacgaccagttaacacaggatcaattttggttgaatggtgaaaaggttagtggcaaagaattagagaaaatttcaaaatatatggatattgtcagaaatagagctggcatcgattggtatgcagaaattgaaagcgacaattttgtaccaacagcagcagggttggcttcatcggcaagcgcatatgcagctttagcagcagcttgtaatcaagcgctagacatgcagctgtcagataaggatttatcgagattggcgcgaattggttcgggttctgcgtcgcgtagtatttatggtggatttgcagaatgggaaaaagggtatagtgatgagacgtcatatgccgttccacttgaatcgaatcattttgaagatgaccttgccatgatatttgttgtgattaatcaacattctaaaaaggtacctagtcgatatggtatgtcattgacacgaaacacatcaaggttttatcaatattggttagatcatattgatgaagatttagctgaagcaaaagcagcgattcaagacaaagattttaaacgccttggtgaagtaattgaagaaaatggtttgcgtatgcatgccacgaatctaggatcaacaccgccgttcacatatcttgtgcaagaaagttatgatgtcatggcgcttgttcacgaatgccgagaagcggggtatccgtgttattttacaatggatgcgggacctaatgtgaaaatacttgtagaaaagaaaaacaagcaacagattatagataaattattaacacagtttgataataaccaaattattgatagtgacattattgccacaggaattgaaataattgagtaaggaagagataaaatgattcaggtcaaagcacccggaaaactttatattgctggagaatatgctgtaacagaaccaggatataaatctgtacttattgcgttagatcgttttgtaactgctactattgaagaagcagaccaatataaaggtaccattcattcaaaagcattacatcataacccagttacatttagtagagatgaagatagtattgtcatttcagatccacatgcagcaaaacaattaaattatgtggtcacagctattgaaatatttgaacaatacgcgaaaagttgcgatatagcgatgaagcattttcatctgactattgatagtaatttagatgattcaaatggtcataaatatggattaggttcaagtgcagcagtacttgtgtcagttataaaagtattaaatgaattttatgatatgaagttatctaatttatacatttataaactagcagtgattgcaaatatgaagttacaaagtttaagttcatgcggagatattgctgtgagtgtatatagtggatggctagcgtatagtacttttgatcatgaatgggttaagcatcaaattgaagatactacggttgaagaagttttaatcaaaaactggcctggattgcacatcgaaccattacaagcacctgaaaatatggaagtacttatcggttggactggctcaccggcgtcatcaccacactttgttagcgaagtgaaacgtttgaaatcagatccttcattttacggtgacttcttagaagattcacatcgttgtgttgaaaaacttattcatgcttttaaaacaaataacattaaaggtgtgcaaaagatggtgcgtcagaatcgtacaattattcaacgtatggataaagaagctacagttgatatagaaactgaaaagctaaaatatttgtgtgatattgctgaaaagtatcacggcgcatctaaaacatcaggcgctggtggtggagactgtggtattacaattatcaataaagatgtagataaagaaaaaatttatgatgaatggacaaaacatggtattaaaccattaaaatttaatatttatcatgggcaataaatgatttgataggggagcaatcatctaatttaattagaagataaatgctccattttttattgtcagccgtgttacgtatcttgaaaaaaatattaaaaagagtaaaatagatagagttaacgaaaaaattaatgaaatcgacgatatagatatgataaagaaaggtgggtagcaatatgaaaaatacattccttatttgtgatgaatgtcaggcagtcaatataagaacgttacaaaagaagttggaaaaattagatcccgatgctgaaatcgtgataggttgtcaatcttattgtggacctggacgccgaaaaacattcacttttgttaataaccgcccactggctgcgcttactgaagaagaattaatcgaaaaagtttctcaacaattaaagaaaccacgtgatcctgaagaagaagagcgtttaagaaaacgacatgaagaacgtaaacgtcgtaaagaagaacaagatagaaagcttaaagaaaaattagaaaagcgaaaagcacaacaataaagcctgatggcagcatcattcaatgcgtgccaccaggtttttatgttttgtctagaaattaaataaatcattaaatgattcggccatcgtaggatgcgtataaatattatctcgtaatacggtatatggaatgttttgatcaatcgcaagtttaattatattaattaattcttcagattgcttaccatataatgtagcacctaaaatcatattattttcattattaatgactactttaaataaacctcttggatcattgttaattttatgacgaggtatagcacttactaaaagttgatgttcagtgtaatcataatgttgagcggcagcttctttactagttaatccaacacgtgataatggtggatctataaatactgtataaggcacgctgcctctattgtcagtcgtacgtgactgattaccatataacgctgatttgataattcgataatcatctaaagatatatacgtaaattgaagtccgcctttaacatcacctgcagcataaatatgcggcacagttgtttgaagatgagcattgactttaatttcgcctctgtcgcctaattcgatatcagtattttctaaagctaaatccgtattcggtttgcgcccgatagccaaaagtactgcatcagcctcaaagttaccaacgttggtatggactgttgtatgatgattgtcagatgacaattcagtcgtttcaacatttgtatgcaatgcaatgcctttattttctaagtcagtaataccatatgcaacgacatcttgatcttcgcgtggcataaatgattcgccacgttctaatactgttaccttactacctaaattcgcaaacattgaagcaaattctaaggcgatataaccgccacctacaataacgaggtgcttaggttgatagctaatgtttaataaacctgtcgaatcgaagacgtgtttagcttgatcaaggcctttaatgttaggaatgacagaggtagcaccggtattaataatgatatgaggtgcagtaatactatcgacgatatcgtcatgttgatctaataaattcacttcagtattagatttaaactgcgctttaaaatccagtacatcaatgttgttatcgtctgctaataagtggtaatttttattgtttagcgcattgacaacatcgtttttacggttataacttgcttcaaaagatttgccttctaatccatcatgtacaagtgtcttcgaaggtatacatcctatgtttatacaagtgcctccatacattttcggagattgttcgataactgcgacgtgttgacctgttgatgcagcgtatttcgctaaagttttaccagctttcccaaatcctattacaattaaatcatatgttttcatgacataaatcctccttttgaatgtcttcaatgacatctttgattgtttttccattataaaaattaataatgatattctgttcgtcttgctgataatgtgacatggtagttgcaatattacgagcaatttgacagtgactgccttcgtcgccagtaaatagacgtgtgtggtgttctttctctaagacaaaatgtttatataatgttgctagagagacatcagcactttgatcatttgctaaataaccgccatctttacctcgtattgtgtcaatcatttttaaatcgacaagttgagtcgtcacgcgtcgtaattgaacaggatttaaacaagttaattctgctaatgaactactattgaatttttctgaatgatgcttagttaaaaaagctaatacatgcacggcaatgttaaattctaaattcaatgtttctcacctcataattgtaactgtattagttacaattaaaaatcattttgctcaatgtgtcaatacttatgtttgaaaagtgttgaattaggtgtggttattgtgatgatttattgtttgaaagttgatgcattaacggtgagattgcacaattgaaattttaattatgtatgaactgatagatatgaaatgaatattgaaaatgagagcaataaaattttgaatgatgatgttgtgtgattgtataaacttattcgtattttagatacgttttgatatttcgcatgatgaggaaatacttttaacaactgatgacatattttaatagtgaatatattttgagatattaatatatttaatgttaaggatgttgtcgcaataaaattaaaatattgaaagataatttttattgattaattgcgaatatacaaagacaccattatatccatatgctaaaataagaaaaaaggcgacatgttatctcaatttacctgcatctagactcctttacataagaaataatcatcgccgagttttaaaattttacaactttgtagatgtaaaaagcatttgattttaaatagtttgaaaatcatatatttttgaaaaaggagcatgccgatgagtattgacatgtatttagacagatctcgaaaccaagcttcaagtgtggggaatttgagtcaaacaatgaattcaaattatgatgcgttggaaaaagcaattactcaatttattaatgatgatgcgcttaaagggaaagcgtatacgtcagctaagcaattttttagtacggtgttaattccattatcaacaagtatgaaaacattgagtgatttaacgaagcaagcttgcgataattttgtgtcacgttatacgagtgaggttgatagcatatctttaaaagaatcagagcttgaagaagatatcagatcattaagtcaacaaattacgcgatatgaaaatttgaataacaatttgaaaaagcatgcttccgataatcagcaagccatttcatcgaaccaacaaataatacgaacattaggtcaacaaaaacatgaattagaagagaagctacgcaaattgcgtgagtttaatcaaaaatcaccagaaatatttaaagaagttgaagaatttcaaaaaattgtccaacaaggacttacccaagcgcagaatttttggaacttttcaacaaatcaatttaatattccttcaggtaaagaacttgattgggccaaagcaagtcatgaaaaatatttgaaagttgctatggggaaaattgaacataaagcagagaaagaaactttaaataaagcagactttgctgttataaaggcatatgccaaagaacatccagaagacgatatcccgaaaagtatattgaaatatataaatgacaataaagacagtattaaaagagatataggattagatattacgtcaacacttttagagcaagacggtataaatgcaagtaaattcggtgtatttatcaatacagcaggtggagtgaaaggcccagcaggtccaaattcatttgtggaagtcaaacgtacatcaggtaatgtgtttatagaaaatggtagtaaatttgcaaaaggcggaaaatacctaggtaaaggtgttgctggtgtaggatttggtataggtatgtatgatgaccttgcaaatgatgataaaacatttggagaggcgttgtcgcataatggtatgacgcttgcagctggatctgcagggacagcagttggagctggattagcgacttttgttttaggaagtaatccagtaggatgggtgattttagcaggtttggctatgagtacagtatttgcattaggaacagatttaatttatcaaaataatatttttggattaaaagataaagtagactgggtagggcataaaatcgataatagtatagatgttgttaaaaaaactacagaaaaatccatggatagtgttgggaatgctgttagtgaagctaaaaatattattagcaatcatataaatccaatgaaatgggcgtggtgagttttgctttttaatattaaggttattaataaaaatccgagatataaagtcgttcaatataatgatgagtatttgttaattgatttagtaagcacttggcttgtatacttttttccttttattaattggttcattcccaaaaggtatgcaaaacttagtgagaaggaacttgaaaatttaaatgttgataaacaaaataaaaataatattttctggccagttactggtagttcgtttttatttgtagttattttacggaaatatgtacatacgtttgaagttcaattagataataagattttaatatctttatgttttataggatttataggtattgcagcattttacatttacttaaataaaaagcttaaactaaagatatatgatgataatctagataatgaaaatagggttatattagtgcctacttttaaagatggaagttttatagttttcacatatctattattaggaggttgttctatattatttttaatatggctaatgactataaaacctcaaaatctactggtatttattatgtggattattattacaatttttttctttctaataagcatgggctcaattagtaataaaaaggtttatgccaaacttaaaaagcaatagaaattactaaacttagattgtagttcgtaagttaagtaataaacaggaaaatagtatgttactaaaatacaaaacacttataaagtatctgaaagtgtattagatataaaaccaacgagacggaagtggagatattgctttgcgaggttagagttgtaaacaaaaatcccagatatagaattattaaatataaaaacgactatctgatgattgatttagtaagcacctggttagttttgttctttccgtttattaattggttaataccaaaaaaatatgtccaaatcagcagagaagattttgataatttaaatattgtcaaaccagttaaaaataaagctttatggccagctataggtagcatacttttatttggcactatgtttagagataaaatatatatacctgattctcatttagaaaaaaattgcgttattatcatttgttcggttttattattaagtattctagtgttttatatatatttaaatcagaaagtaaagttatctatctataatgatcggagtagcaatggaaaaattatgatttttccatcattcaagaatctttgctttgtactattttcttattttttctgtggtggattatcaatcatgttcttagatgttttgattagtttatctatccaaaatattatagtatttattgcttgggttattatgacaatgctatttttctttataaatatgtcttcaataatagacaaaaagattcatgttatatatttaaggtcatataaatattaattttgatacaaaagggcacaagtgttttgagaaacagaaacgataatatagctgtgtgaatttgttattaataggaagtgataattattgctttgtgaaaccgaaattatcaataaaaatccgaaatacagagttattaagtatgatgatgagtatttaatggtcgatgtaataagaacttggcttgtatacttttttccatttattaattggttcattccaaaaaggtgcgccaaaattagtagagaagagtatgaaaaactgaacactgttaagccagttaaaaataaaaatttttggcctgttgtaggaggaacaatcctactaggtgctacttccagaaagtacatacacttacttaatattcaattagaaaaaagatcggttatatttatatgcttcgttgtatttctatgtattttaatcttttttgtgcttctgaatcgaaaattaaaattgaaagttttcgataataaaaaagaagaacaaaaaataattttagtaccaacattaaaaaatgctgttcttatattatatggctatttgttgattggaggcatgtcaatattagctttaagcatgttgctgacattagaaaaccagaatttaataacttttatagcttggggtatggggttaatgttgtttttcttgatgaatataacactcattgtcaataaaacagtcaaagttataaaaaggtgaataaataactaattatattgtattggccgttcttcaaataaaaaataatttgaataaggtggaagtgataaacagtgctttgcgaatctagagtcattaatcaaaaccctaaatatagaattattaaatacaataatgaatatttcatggttgatttagtaagtacttggattgcttattttttgcccatgattaattggtttattcccaaaaagtacgcgaaaattagtagagaagaatttgaaagtttaaatattgtcaaacccgctaaaaataatactttctggcctgttgcaggatttgcagtgttattaacaaccttaacaagaaaatatatctatttgcttaacatccatttagaaaaagaaatagttatattaacatgctgtatgatacttctaggtgttttcgcattgtttatatatataaatacaaaattgaagttacatatttttgataaaaataaaagtaataacgaaaagatcatattaatacctacatttaaaaatatttgtttatccttatttgcttatatattatttggtggattgtcaacaatggctctgagtatgttagtaacttcatcccctcaaaatataatagaatttcttgctttaattggcatgactgcatgcttctttctactgaatatgtcatcggttctagataaaaaaattcatgttattttaaaaacaaataagtagtaaaattgattaacttaggtagtatcggatacttaaatgttggttcataaaaagcaatgattttaaatcgaggagctatcttagaacagggaaataaaacagccaaagttataaaaagtgaattaataactaattatattatgttagccacgcttcaaataaaaaataattagaataaggtgggattgataatcaatgctatgcgaatctaaaatcatcaataaaaaccccaaatatagaattattaaatataatgatgagtacttaatgatcgatataataagcacttggattagtttgttttttccttttattaattggttcatccccaaaagatacgtcaaaattagtagagaagagtttgaaaatttaaatattgtgaaacctgctaaaaagaatgttttttggccagttgcaggtatctctactttattcgcagttacattaagaaagtatacacatttacttgacactcaacttgatagaaaattagttattgctatatgttgtatcacatttatagggattttaacattttatgtacgcctaattaaaaaatcatctttaaatatttataatactaaaaataaaaggtcaaaaattatcttaataccaacactaaaaaatttttgtttaacattgtttagatatgctttttttattttatggacagtgattttctcatatgctctattatcaatgagttatcaaaacataatagtatattttgcttggattacagcaataatgggtttttttcgtagtgaatatagctttaattatagataaaaacattcatgtcatacttaaaaattaagtgaaagtactaaattcagattaaaaatatgaaaatatcagttaataaaacctttgatgacagtaacttgatagtatttgaatgtcttttgaagtatcgaaaaatgtattacacataaaattaaagggatgtggagacattgctttgcgaatctaaagttattaataaaaaccctaaatatcgaataatcaaatacgatagtgaatatttaatgattgatttggcaagtaattggattgtcttcttctttccatttattaactggctcataccgaaaacatatgtcaaaatcactaagaatgattatgaaaaattaaatattgtcaaaccagttaaaaataaatcgataggatggaccatattcgcgggtattgtgttacttggtggtactgtaagaagaaatacttatttatttgattttcaattagaagaactaattgtttggagcagctgtttcattgggtttttagagattatatttttttattgttatctaaataagaaattaacattaaatatttataatgaaagtaaaaataatgaacttaaattaagattattaccctcctttaaaaatatttgtttcacaattttttattacctatttactggtttcatgtcttatggggcattttacttgttggtatttgaaaatgtgcaaaatttaatcttatatgtttcttggcttttcatgactatgctatttatgtttatgaatatgcattcaattatagataaaaaagtacatatattcttaaagtctaataaatagttacaaatttagttagttttcaattgttaattaggggtggtaaacagtgctttgtgaatctagacaaatttataaaaatcctaaatatcgagttattagatataataatgaatatttcatggtcgatttagtaagtacttggattacttattttttccctatgattaattggtttttgcccaaaaaatacgcaaaaattagcgaaaatgaatttgaaaggttaaatatagtcgagcctgttaaaaataatgttttttggccggttgcaggaagttcagttctatttggaattatattgagaaagtacggtaacttctttaatgttcagtttgaaaaacaactagcaatcactgtattttttatcatgttaatagggatgttaattttttatttttatctaaataaaaaattaacattaaaaatttttaataccaacgtggttaataagaatagagttgtattaataccgactttcaaacaaggattgttaatagtttttgcgtactttttttaggaagcgcttcaatatttactttaaccattcttttgacgacagagtcacaaaatataataatatttttaacttgggttattatcacgatgtttttctttttagtgaatatggcttcgataggtaataaaaatgttcatgttattttaagaataaacgagtagtaaaaatgatcgaaattggtagtatcgcatatttaaacggtggttcaaaaaaatataatcatatcttaaatcaggaaaatagatagtaatgtttgaatataccaagtgaaaatgcccattgtgattgataaaggaaaaaactgttttaatttaaaaatgaaatatagagcgtgttattttgtatgatagctcttataacattggcgtttttaatccaatagtatggacggttttagctggttttgttgcggaatctgtttagacaattcttaaaaattggacttttcatactaataaatttggattaagagataaaactaattggataagacattaaatagacgctgtttaaaaataccacagaaaaagctgtagatagtgttggaacgatagttggtgaaggtacaaaaagtattggggatcatttaaaactaatgaaacgggagtggtaaatgttgctttgcgatgtcagagtcatttataaaaatccgaaatacaaagtcattcaacataacggtgaatacttattagtcgatttagtaagcacttggttcgtgtacttttttcctttcattaattggttcattccaaaaaagtacgcgataattagcgaagaagaatttgaaaatttaaatgttgttaaaccaaataaaaataatgttttctggtcagttataggaagttcggttttgtttggagttactttaaggaaatacatacatgtttttgatgttcaattagataagctagttgtaatgatattgtgtgctctcgctttaatttgtgttatagttttttattttaacttaaatagaaagcttaagttaaaagtgtttgatacaaatattgaaaaaaataagagagttatattaataccaacgtttaaacttggctgttttttagttttcggatatattttcgctggaagtttttcaatattttcattaattgcccttatgacaatcgaacctcaaaatataataatatttatttattggattatgatgacaatgcttttctttttgttaaatatgacttcgataggtaatgaaaaagttcgcgttataatgaaaaataattgattacatttaaaatattctaaatgttgtcgacacaatccttttaagacgctagtagaatttaaatgacttctaatgtatatgaaagtgtatcaatataaaaccaattgaaaagaagtggagacattgctttgtgaaactgaaaatattaataagaatcccaaatatagaattatcaaatacaaagatgaatatttgatgattgatttagtaagtacatggttagcactctttttcccaatgattaattggctgattccaaaaaagtacgtcaaaatcagcgaaaaagattttgaaactttaaacattgtgaagacagctaaaatcaattctttttggccagtggcaggaagtacggtcttatttggtgttatgttaagaaggtattcccatttatttatcgttaaatatgaatatagtatagtaattttaatttgttgcatcataatactaggtatttttctgttttttttatatttaaatcaaaagttaaagttacaaatctataatgaaaacaaaaataaaagcaataagataatcatatttcccactttaaagagtctttgtttatcaatagttttatatatttatttaggtggtggttcattctttactatttatatgttattgacgattgaagttcaaaatataatattatttataactttgtttgtaatatttttgtttttcttatttttaaatatgtgctcactatatgacaataaagttcatgtattatttaaatcaaatggaattgaaaagttttaataggaataataaacaaaggaatggtagtgataaatattgctatgtgaatctaaagttatcaacaaaaatcctaagtatagagttattaaatatggtgatgaatatttaatgattgatttagtaagtacctggttaactttatttcttcctatgattaattggttaattccaaaaaaatatgtcaaaatcagtaaaaaagaatttgacgatttaaacattgtcaaacctgttaaaaataaagctttttggccagttgcaggtagtactattttgttcggagttacgtttagaaaatatattccttcacttaatattcaattagagaaaaacatggtgattgtaatatgttgtgcaatatttctgggtgttttaatactttttttatttctgaatcgtaagctaaggttggaaatttataataataactctagtaaagggaaaataattttatttccttcattaaaaaacttttgtttcacaatattttattattttttatttggcggtctttcaataatggctctaagtatgttattaactttaaatcctcaaaatataataggctttattggttggttggtaatgactgcaggtttctttctgttaaacatgtcatcgattattgacaaaaaaatttatgtattatctaaaactaacacggtggaaaaatgatggtttagctggatttactgcaggttctatttcggcaatacttgtatattggaccaatcaaaaaaatgaatttggaataaaagataaaaacgattggataggacataaactagacgttggtatagatgctgtagaaaaatctgcagaaaaaacagtagatggtgttgaaaatgtcatggtgaagcttcaaaaagtatttctaatcatataagccctaagaaatggagctggtaaatgttgctatgcgaatctaaaatcatcaataaaaacccaaaatatagaattattaaatataatgatgaatacttaatggtcgatataataagcacttggattagtttattttttccttttattaattggttcatcccaaaagaatacgtcaaaattagtagagaagagtttgaaaacttaaatattgttaaacctgctaaaaagaatgttttttggccagttgcaggtagctctgctttgctgggagttgcattaagaaaatatacacatttacttgacattcaacttgataaaaaattagttattgccatatgttgcatcacatttatagggattttaatattttatgtacgcctaattaaaaaatcatctttaaatatttataatactaaaaataaaaggtcaaaaatttttttaatacctacactaaaaaatgtttgtttcacattatttggatatattttatttggcggattgactatgctattcctagatgcactattatcaatgagttatcaaaacataatagtatattttgtttggattgcagttataatgggtttttttctagttaatatagctttaattatagataaaaacattcatgtcatacttaaaaaccaatagaaattaccaaattaaatttgcaatggctttaatattgtcgttcttaaatgtttttcaatttctgattcaaaagtacatgtaatttaaaggtcaacgagcaatcgcgctatatgcatatcaatttaagcaatacttattttaactgagttttatataacgttttcctattacaccgcttaaattcaagctctaattctaacatttggaagttgtattaaatcatgatagtgtgatagtggaaaagttataaagataaggagctgggtctaatgaagcaatttgtaaacttaggtaaatctgatgttgaagtgtttccaatcgcacttgggacgaacgcagtaggtgggcataatttatatccgaacttagatgaagaacaaggaaaagatgttgttcgtcaagccattaatcatggtattaatttattagatacggcatatatttatgggccagaacgatcagaagaattggttggagaagttgttaaagaatatccgcgagagcaaattaaaattgctacgaaagggtctcatgaatttgatgaaaatcaagaagtacatcagaacaatcaaccggaatatttaaaacaacaagttgagaatagtttgaaacgtctacaaactgattatatcgatttatattatattcattttccggataacaacactccgaaagatcaagcagttgcagcattacaagagcttaaggaacaagggaagattaaagcaattggtgtatcaaatttcacattagatcaacttaaagaagcaaataaagatggttacgttgatgttgtacagttagaatataatttattgcatcgcgaaaatgaggcagtattacaatattgtgttgatcaccaaatcacatttattccatatttcccattagcatccggtattttagctggaaaatatgatgagaacactaaatttagtgaccatcgtactacacgtcgtgattttaaaccaggtgtatttgaagaaaatgtgcgtcgcgtaaaagctttggaaagcatagctgcagcacatcaaacttcaattgcgaacattgtattagcattttatttaacgagaccagctatcgatgtgattattcctggtgcaaaacgtgcagaacaagtcgttgaaaatattaaagctgcagatatcgttttatcagatgatgagattcaatatatcgatgaactgtttccgattgaagactaaatgaattgtatttaatggtgatatatgtatctaatttcatcatgaattagccccgtatcacaaacgacgttatataaggcatgacgaaatttcgtcaaatttatataaaagttgtaagcgttttactattcggtaggcaaagcttatgatagtataattaggtaacgaaaaacacagatatttattaatcaaaagtgaggttaggctaaaatgattactgttttgtttggtgggagtagaccaaacggtaatactgcacaattaacaaaattcgctttgcaagatttagagtatcaatggattgacgtgacacaacatcagtttaaaccgatacgtgacgtgagacatacagcagagactattacttcatatgacgatgactatttgccgattctagataaaatattggctagtgatacaattatttttgcatcaccagtgtattggtatagcatttcagcaccattgaaagcatttatcgaacattggtcagaaacattacaagataaacgatatcctaattttaaggcacaaatggccgaaaaggattttagagttattttagttggtggagattgtccaaaaataaaagcgaagccagcaattacgcaaatgaaatatagtttagactttttaggtgccactttaaatggttatattattggaactgctgaaaagcctggtgacatcatgaaagacaactatgccttagcacgtgcaactgagtggaatagtatattgcaataagacatacctcatactaaacgaagtgattttttgcttcgttattttttatttttaattttaacggaaaatataaatatataaattgaatagacaatcattgtttattaagtattgagcaagttgtggtataatgccgttattaaaacttgttaataaggggagaaagtcatgttcaaggtaagacaagcaactgaaaaagatgttgttcaaattagagatgtcgcaactaaagcttggtttaatacatacttaaatatatacgctgcgacaacagttaatcacttgttagaagcttcatataatgaacatcatttaaagaaaagacttcaagaacaattattcttagtcgttgaagaaggtaatgacatcgttggctttgctaactttatttacggtgaagaattatatttatcagctcattatgttaaaccagaatcgcaacatacaggttatggtacagcattgttaaatgaaggattatcacgttttgaagataaatttgaaggtgtttacttagaagtagataataaaaatgaagaagcagtagcttactataaagagcaaggttttacaatcttacgctcttatgagccagaaatgtatggcgaaaagttagacttagcacttatgtacaaagcattttaagtaaattaaatattatattaaacgaaaaggaggggaataatgactaacgcatatgtagatttaaaattagtagaagaaaaagtttttaaagacccgatacatcgatatattcatgttgaagatcaattgatatgggatttaattaaaactaaggaattccaaaggttacgtcgaattagacaactaggaacactgtacctatcttttcacacagcagaacatagtcgctttggacattctttaggtgtgtatgaaatagttagacgattaattgatgagtcatttattggtcatgatgcatgggacaataaagatagaccgttggcattatgtgctgcattattacatgatttaggacatggtccattttcacatagttttgaaaaaatatttaatacagaccatgaagcatacacacaagcgattattactggagatactgaggtgaatgctgtattacgtaaagtggcgcctgagtttccaagagaagttgcggaagtaattaataaaacgcatcataataaattggtcatttcgatgatttcgtcacaaatcgatgcggatagaatggattatttacaacgtgatgcgtatttcacaggtgtatcatatggtgcttttgatatggagcgtattttaagattaatgcgaccttctaaagatgaagtactaatcaaagaaagtggtatgcatgcagttgaaaactttattatgagtcgttatcaaatgtattggcaaatttacttccacccagttagtcgtggtggagaagtgctgcttaataattgtttgaaacgcgcaaaacagctttataatgaaggctatgaatttaagttgcatccacatgattttattccattttttgaagagacagttacgattgaacaatatgttgaactcgatgaagcggtagttacgtattatttggaaaaatggacaaaagaagatgatgctattttaagtgatttagcaagtcgatttattaatcgagacttatttaaatatattccatttgatggctcaattattacaatatcagaactgcaagaactgtttgaagcaggtggtattaatccagattattattttgtgagtgaagcattttctgatttgccatatgactatgatcgaccggggtcaaatcgcaaaccgattcatttattaagacaagatggtacgattagagaaataagcaatcaatcattagtcattcatagtattacaggcattaatcgccaagactataaattatattatcctagagaaatggttgcaaagattaaagataagacaattagagaagctattgaaaatttgattaatgagcttaattaaacagggctaaaattgttatcgttaaatatggaggttatatcattgtctgagaaaaaaggctttaattttaatatcataaaaaatgaccctctagatggtcataaaggtacaaatattggttcaattagcttagacaatattgcaccagtttttatcgatgttgctaacaaagaagcatttattgatattggaggcatgcatgctcgtgccaaagttgaaaaaggtgtgaaatggattactgataaagctgctgttgaaggcgatgaagctaaagaatattggttgtgttgggtaacaacagaacgtaatgaacaaggaccatattacgctggtttaacagcgtgctatttattagtgaataaagcaattcgtcgtggttataaaagtatgcctgaacatgttaatatgatggataaatcaatgaaacatcatattatcatagatcaaattggtgacgagaataaagctattttaaaagactttttaatgaaccatgatgaaggtatgtggaagcattcttctgatgctttacatcaagcatttaattaaatattagaaactaaaatttcccaattaatctataaagatatgattcatttctcaatgacgacgtaaatcgtgaggtgaaaataatgtcttagattgattgggagtttttttaatttttttgaaattaaattaatctgtagttaataaaaaatttgaataactgacacatttttttgatcatagctatatactttgtgaattaattcacattataataagagtgaagataagagtattataaattatctttaaataaatatatgtgaagtaaaaattacacgttagcatatcgattatgtcatttcttttaacatattaactagggaaacgttaaaagttaacggttgatatctaactaaaaacaaggtcacagtagtatgttttaatctggcgtctattacaaataaaaattacatctataattattcgttttcttttttgaaagtaatagccaattaatatcatacatactggagtgactataaggaggacattattatgagagcagcagttgtaacgaaagatcacaaagtaagtattgaggacaaaaagttaagagctttaaaacctggtgaagcgttggtacaaacggaatattgtggcgtttgtcataccgatttacatgttaagaatgctgattttggtgatgttacaggcgttactttaggtcatgaaggtattggtaaagtcatcgaagttgcggaagatgtagaatcattaaaaattggagaccgtgtgtctatcgcttggatgttcgaaagctgtggaagatgtgaatattgtacaacaggtcgtgaaacactttgccgtagtgtgaaaaatgctggttatacagtagatggtgcaatggctgaacaagttattgttactgcagactatgctgtgaaagtacctgaaaaattagatccagcagcagcgtcttctattacatgcgcaggtgtgacaacttataaagctgtaaaagtaagtaatgtaaaacctggacaatggttaggtgtttttggtataggtggtttaggtaacctagctttacaatatgctaaaaacgttatgggggctaaaattgttgccttcgacatcaatgatgataaattagcattcgcgaaagaattaggtgctgatgctattattaattctaaagatgttgatccagttgcagaagttatgaaattaactgataacaaaggattagatgcaacagtggtaacttcagttgctaagacgccatttaaccaagcggttgatgttgtaaaagctggtgcaagagttgttgccgttggtttacctgttgataaaatgaacttagatatcccaagattagtgcttgatggtattgaagtagtaggttcacttgttggtacaagacaagacttacgtgaagcgtttgaatttgctgctgaaaataaagtaacacctaaagttcaattaagaaaattagaagaaatcaatgatatttttgaagaaatggaaaatggtactataactggtagaatggttattaaattttaaaaatatcaactgactatatagataaagaaggtagtgctctgaacactatcattataatcaaacacgaggttttcatgaaagatagtgaaaatctcgtgttttttggttttgaggtgttgtttgtattttataaaatggcttacatatatgaagcgttgattaagtatggaattgttaattaattgaacctatttagctttaagaaggcataacaagatgaccttattttatgctataatatttctattatgcgaagattaaggtgagtagtaaattggataaaaaagtaagtattcaaacaaagcaagtgttgaaacagcacaacgaaaaagaaaaatttgaatttactactgaaggaacttggcaacaaaggcaatctaactttattcggtatgtagaacaaattgaggatgcaacagttaatgttacaataaaagtggatgatgatagcgttaagttgattcgtaaaggcgacattaatatgaatttgcattttgttgaaggacaaacgacaacaactttttacgatatatcggctggacgaattccactagaagttaaaacattacgcattttacatttcgtaagtggagacggtggcaagctaaagattcattatgaattatatcaagataatgaaaaaatgggttcttatcaatatgaaattaactataaggagataggcgaatgaatattattgatcaagtgaaacaaacattagtagaagaaattgcagcaagtattaacaaagcaggattagcagatgagattcctgatattaaaattgaagttcctaaagatacaaaaaatggagattatgctactaatattgcgatggtactgactaagattgcaaagcgtaatcctcgtgaaattgctcaagcgattgttgataacttagatactgaaaaagcacatgtaaaacaaattgacattgctggtccaggattcattaatttttacttagataatcagtatttaacagcaattattcctgaagcaattgaaaaaggtgatcaatttggacatgtaaatgaatcaaaaggtcaaaatgtattgcttgagtatgtttcagctaaccctacaggagatttacatattggtcatgctagaaatgcagcagttggtgatgctttagctaatattttaactgcagctggctataatgtaacacgtgaatattatattaatgatgctggtaatcaaattactaacttagcgcgttcgattgaaacacgtttctttgaagctttaggtgacaatagttattcaatgccagaagatggctataatggaaaagatattattgaaataggtaaagatttagcagagaaacaccctgaaattaaagattattctgaagaagcacgtttgaaagaatttagaaaattaggcgtagaatacgaaatggctaaattgaaaaatgatttagcagagttcaatacgcattttgataattggtttagtgaaacatctttatatgaaaaaggagaaattcttgaagttttagcaaaaatgaaagaattaggttatacgtatgaagctgatggcgctacatggttacgtacaactgattttaaagacgacaaagacagagtattaattaaaaatgacggtacatatacgtatttcttaccagatattgcgtaccacttcgataaagtaaaacgtggtaatgacattttaatcgatttatttggtgctgatcatcatggttatattaatcgtttgaaagcatctcttgaaacgtttggtgtagatagtaatcgtttagaaattcaaatcatgcaaatggttcgtttaatggaaaatggtaaagaagtgaagatgagtaaacgtactggtaatgcgattacattaagagaaattatggacgaagttggcgttgacgctgcacgttatttcttaactatgcgtagtcctgatagtcactttgattttgatatggaattagcgaaagagcaatctcaagacaatccagtttactatgctcaatatgcacatgcgcgtatttgttcaattttaaaacaagcgaaagagcaaggtattgaagtgactgctgcgaatgattttacaacgattactaatgaaaaagcgattgaattgttgaaaaaagtagctgatttcgaacctacaattgaaagtgctgctgagcatagatcggcacatagaattactaattatattcaagatttagcttctcatttccataaattctataatgctgaaaaagtgttaacagatgatattgaaaaaacaaaagcacatgttgctatgattgaagcggtcagaattacattgaaaaatgcattggcaatggtcggtgtaagcgcacctgaatcaatgtaagaacatttatatacactccaacgtagagtttctcgaaagatactttgtgttggagtgttttttttaggtatgtgacatattggggaatgcttagtatgtgaataaggttaagaggaacacagttggatgctctgcacaactgcataagagagcctgagacataaatcaatgttctatgctctacaaagttataatggcagtagttgactgaacgaaaattcgcttgtaacaagcttttttcaattctagtcaaccttgccggcggggccccaacaaagagaaattggattcccaatttctacagacaatgcaagttggggtgggacgacgaaataaattttacgataatatcatttctgtcccactccctctaaaatggagggtgtaaatgttaggaactgatgaattatataaagttttatatgaacatctcggaccacaattttggtggcctgctgataatgacattgaaatgatgttaggtgcaattttagttcaaaatactagatggcgaaatgcagaaattgcattgaatcagattaaagaacatacgcattttaatccaaatcatatattagaactacctattgaaacgttacaatcattgatacattcaagtggcttttataaaagtaaatcactgacgattaaaacattattaacatggttagcacgacatcatttcaattatcaagagattaatgagcgatataaaggtggattaagaaaagaattattatctttgaaaggtattggaagtgaaacagcagatgtcttacttgtttatatattcggacgtattgaatttattccagatagctatacaagaaaaatatatgataaattaggatatgaaaacactaaaaattatgatcaattaaaaaaagtagtcacattaccaaatcattttacaaatcaagatgctaatgaatttcatgctctgttagatgtatttggtaaacattactttagagacaaagatataaagaattatgattttttagaaccttactttaaaaagtaaacgctgtgaagttagatagatgagtttatatgaaatataaaaaataatttactattttcttttagtatgtggacttatataataaatagaagcatataaagaaaaaaacagttgtttgtttgtgcagcaactgcataagagcccctaatcgctaaagctcaaggggagtaaaggaatacagttgtttgtgcagcaactgcataaaagcctctaatcactaaaggtgaagaggaacgcagttggatgctaaggcacaactgcataaaagcctctaatcgctaaagatgaagaggaacgcagttggatgctaccgcacaactgcataaatccctctaatcgctaaagcgaaaagtgggattaaaaaggagatgtgatagtgtgaagaaatcgttaattgcttttattttgatttttatgcttgtcctgagtggctgtggtatgaaagataatgataaacaaggtagcaatgataatggctcgtctaaatcgccgtaccatagaattgtttcgttaatgcctagtaatactgaaattttatatgaattaggattaggtaaatacatagttggtgtttcaacggttgatgattatccaaaagatgtgaaaaagggtaagaaacaatttgatgctttgaatctaaataaagaggaacttttaaaggcaaagccagatctaattcttgcgcatgagtcgcaaaaggcaactgctaataaagtattgtcatcattagagaaacaaggcatcaaagtagtgtatgttaaagatgcacaatcaattgatgaaacttacaacacatttaagcaaattgggaaattaacgcatcatgataagcaggctgaacaacttgttgaggaaactaaagataatatcgataaagtcatagattcaattcctgctcatcataaaaaatcaaaagtatttattgaggtttcatcaaagcctgaaatatatacagcagggaagcatacattttttaatgatatgttagaaaaattagaagcccaaaatgtgtatagtgacattaatggttggaaccctgtaacgaaggaaagtattattaaaaagaacccagatatattaatttcgacggaagctaagacaagatcagattatatggatatcatcaaaaaaagaggtggattcaataaaattaatgctgtcaagaatacacgtattgaagttgtaaatggtgatgaagtatcaagaccaggtccacgtattgatgaaggattaaaagaattaagagatgcaatttatagaaaataaaccattctaattatgccccttattgctacatgtaaaaaatacatgtttgagataaggggtttttaaaatatatttagtgaatgatagcaacgcgagtatgtgattgctataatgaatgtaattatcgatgaaagaaaagagaatgctatgacatttaataaagtattattgagctggatagtcatattgattataacaactagcatatatctattttggcagttgggcgatatcaatgatgtatttaaccagtctattttaatcaatgttagattaccgagattattagaagcattgttgacaggtatgatattaactgttgcaggccttatatttcaaacagttttaaataatgcattggcagatagctttacattaggattggcaagcggcgctacatttggttcaggattagcattatttttaggtttaacaacgttatggattcctgtattttcaataacatttagtttgataacattaataactgtattagtcattacgtcggtattgagccaaggctatccagttagaatcttaatattaagtggtttaatgattggtgcgttattcaattcacttctatattttttgattttattaaaacctcgcaaattaaatacaattgccaattatctgtttggtggttttggtgatgcagaatactcaaatgtatctataatagcaatcacatttatcattgcattgtttggtatatttatcattcttaatcaactaaagttattgcaattaggagaactaaaaagtcagtcactaggcttaaatgttcaattgattacatatatcgcgttatgtatagcttctatgataacggcgataaatgtcgcatatgttggcatcattggattcattggtatggtgataccgcaactcattagaaaatggcagtggaaacaatcattaggaagacaattggctttaaatattgtaactggaggacaaataatggttatggcagattttattggtagccatatattgtcaccagtacaaataccggcaagtattatcattgcattaattggtataccagtgttattttacatgctaatatctcagtcgaaacggttacactagcacacgacatttgctaaaataaaaataactataaacataaagagggcataagcgatggatttgaatcaaattaaagcagttgtatttgatttagaaggtacgttgttggacagagttaaatctcgagagaaatttatcgaagagcaatatgaacgatttcatgactacttaattcatgttcaactggcagattttaaaaaagcatttattgagctagatgacgatgaagataatgataaacctgatttatataaagaaatcattaaacgtttccatgtagataggttaacttggaaagacttatttaatgattttgaaatgcatttttatcgttatgtatttccttattacgatactttgtatacactagaaaagctatcgcaaaaaggctttcaaattggtgttatcgcaaatggtaaatctaagattaaacaatttcgattacattcacttggtttgatgcatgttattaattatttatcaacatcagaaacagttggttttcgtaaaccacatcctaaaatttttgaagatatgattgatcaactaggggtattacctgagcaaattatgtatgttggcgatgatgcgttaaatgatgtagctccagcacgagctatgggcatggttagtgtatggtataaacaagaagatgctgaaattgaaccactcgaagaagaagttgattttacaattacaacagtggaagaattattaaccattttaccaataaaaaatgataataaaggagaaaattatggatctatttactagaaaagatggaacatcgatacattacagtacattaggtgaaggctatcctatcgtattgattcatactgtacttgataattattctgtgtttaataaattagcagcagaattagcaaaatcatttcaagttgtgttaattgatttacgtggacatggctattctgataaacctcgtcacattgaaataaaagatttttctgatgacattgttgaattacttaaatatttatatattgaagaagttgcatttgtatgccatgaaatgggtggaatcattggtgcggatatttcagtacgttatcctgaatttacatcatcacttacgttggtaaatccaacatctattgaaggtgaattaccggaagaacgtttatttagaaaatatgcccatattattcgaaactgggatcctgaaaaacaagataaatttttaaataagcgtaagtattatcgtccgagaaaaatgaatcgattcctcaaacatgtcgtagatacaaatgaaatatcaactaaagaagaaattcaagcagttaaagaggtattcaaaaacgctgatatttctcaaacttatagaaatgtcgtagtaccgacaaaaattattgcaggagaattcggtgaaagaacaacaagattagaagctaaagaagtagctgatttaatccaaaatgcggactttgaagtatatcaagaatcaagtgcattcccatttgttgaagagcaagaaagattcgtcgaagatacagctgcatttatcaacaaacatcacgatgaaaagcatgtttaatttttagtgataagtgaaatataaaagtagtaattattatttgtaatataattgtaatatgactgttgttttagaaatgattgttgtataatggttgtgagcacaagacgatataaataaaaggagagagtgcttatgaaaaagctactaacggcaagtataattgcatgttctgttgtaatgggagtaggcttagtgaacactagtgccgaagcagcaagtggcaactctattgatactgttaaacaattaattaagggtgatcagtcattagaaaatgtgaaaattggcgaatctattaaagatgttttaactaagtacaaaaatccgatgtattcttacaatgaagatggaactgaacattattacgaattccatactaaaaaaggtatgttattagtaactactgatggtaagaaaaacaatggtaaagtaactcatatttcaatgatgtataatgatgctaatggtccaacatatcaagctgttaaaaattatgttggcaaagcagtaacacatacggaatatagcaaagttgctggtaattttggatatattgaaaaaggcaaaacgacttatcaatttgcctcagcaccaaaagataaaaacataaaattatatcgtattgatttggaaaaataataattaaattaatcgtgcttaaccgacaagttaaatcgcaatacttgtcggttattttattacatggcataatacagtgaatattaatttttatgatttgcgaaggggaaattaaaccaatacaataaataaagatgtttcattttaaaggagtactaccaatgcgtattaacgataaaattttactagaaaatatagaagattactttaatcataaaggtttatcaccgcatttgattgatgatattaaagagaaagtaattactgatataaaaaattctgaaaagaaagatcaagattatattgaatataaaagaaaatctccagcacaaatcatattaatgattcaaaggaatttgtttgctttacaaatgaatccagttattttctttattataaacttcattctcatatcctatttatatgataaacagtatgttcagtttcaagctattactggaatgagtctattttattgtttagtgatttttccaatgactattgttgtatacctaagggtgtctcaaaagaattacttgcgtagtaataaaatagaaatgattatgggtacaattatcgctatcatatccttgttattaattatattacaagcatttaatattacttggggcgttataccaattacaaattttggacatcaatttttctttttcattggtattattttagtaattgccggcatattttataagcgacttgagttttcgggaatcgggttattattttgtcaaaaaaccgtcgatgcaatgattcataatccacaatcagcccagattttttcattaattatatggatattattagtagttctagttatatatttcacaattagattatcttcacgtacaagattataaatatgataaaactattcacttgattaattgtattaattgagatgaatagtttttttattgttggaataacttttggtaatttataaataatttaaaaaaattgtttataaaatggaagcgtatatagaatgaaggttgggtatatagtttattgagggaggtgtcacaatgaataaagtcacaattaatcctcaaatccaattaacttatcaaattgaaggtaaaggggatcctataatattacttcatggattggatggtaatttagctggatttgaagatttgcaacatcaactagcatcatcatataaagtacttacttacgatttaagaggtcatggcaagtcttctaaaagtgaatcatacgatttaaacgatcacgttgaggatttaaaaattctaatggagaagttaaatattcatgaggcacatattctaggacatgatttaggtggggtagttgctaagttatttacagataaatatgcttatcgtgtaaaatcattaactaccattgcatcgaagaaagatgacttaatacacagctttactcaattgttaatacaatatcaagatgatatagcgggttttaataagtctgaagcgtatattcttttattttctaaattgtttagaaatcaagagaagacgatgaaatggtatcaaaaacaaagaatatatagcattaagtctgaggatgatagtgcggtggcaattcgttcattaattttgcataaagatgaacctatgtatttaaaaaaacgtacatgtgtacctactttgttaattaatggggaacatgatcctttgattaaagataagaatcattttaaattggaagcgcattttttaaatgttacgaaaaaaatcttcgaacattcaggacatgcaccgcatattgaagaaccagaagcatttatgaattattatttaaaatttttaaaaagcgtatcataatatgtgatatataaacctagggcataaagtccttaggcaatgtgaaaaagctgattactattcattatttgatagaaatcagctttttttgaaatgtatttgatatatactgctcgttatgcggctatcttccttatattaagtgccattagtgcaaaacctcttaacaattaggtaaaaagagcataaaaaaaggaagtttaatagaatgtatcatctatcaaacttcaccaaattgcgctaaacaaaattatagttcaatttcgttgtttgcttcagtgattcgtttatttactcgactcaataatgattcgatttttttacgttgttgtgcattaacaagaattaatacagttctttcatcatgctcattacgttttttatcgaagtaatcttcttgagataaaattttaactgctttaacaacttgtggttgtttgtagtttaaatgattaataatatctttaagatagtattctttctctttgttttcgctgatgtatgtcaatacagcgaattcttcaaagctaattgaaaattcctttttaattaaactttttaatttgtcagcataagtgaccattgataacaactcaaagcaatcattgatttttgtaattgccatgtttaaaacctccctatttgatgcatcttgctcgatacatttgcccgataatatattgatatctaatctttatttattatagatatgttagtcataattttgcattaaataagttttattaaatatatttaatgctctattatttagttaattataactaattaaaaatgagaagtaaacaaaaaagtgtttataaaacaaattattcattagacacagtgattgtatttctgggttagcatttggtttagtcaaaaatatcagcattttttataatttaccttaatttaatcgacaatacaaggtaatttatttaatgaaacgatttagcgcaattaaatgtttcgatattcaatgtgtgtctaaagagattctttgttatagcttaactcttccaagttaacttcttctactatttatacccatttttcagaattttatcactaaaaatgaaaaatttttataatttttttaatttagtaattctcagtgcagttttaatgataagaaaaacacattaatttagtgattaaaaccaatctatagcacgttaaagtgtctatacgttattccgattgataacgggtaacaaataatagaaagtacgataattgatcatgcattaaagcacttttatttttcaaactcgactcaatgaattataaaaagttgtgcattttgacttatttttaattaattgaataaccaactatgaaatattagcacgaataacataatttttgctattaatttggtgtaaattattaaaaaataacattaatttaggtcttaagaatgagttgactatcgaatttgctaaattaaaatttgttgtgtcaaagcatactacccaaatcaacgcttttctaaagatttttagaccacaaaaaaatagcttatcacttttaaaaataattacaagttaaaatgataagctaaaagttaatttaaaataatcttaaaagtataatgcctgtcaaaatacataatagaccaatagtttttctggatgtcattgctattttaggtgaaccaaataatccaaagtgatctatcaatatgcccattagaatctggccaaacatcccaataagtgttgttaatgctgcacccatatgaggcattaagataatgttagctgttacaaaagccatgccaagtataccgccagtaaaatagataggctttaatttaccgaattttaaatgacttgtttttagttttaaagaacgattaaaaatagcggttaaaatcaatagcgctattgacccaattgtaaatgatactaatgatgcaaaggctggtgaatgagtatgactagctaaagcactattaattgtcgtttgaataggtggaaagaaaccaaaaataaatcctaatagaagccaaaacagtaaatacttttgatcagttagtaataaattattcttgttaaattgattcattatgacgatgccgacaatgagtaacaatactccaattgctttaattaaattaaaatcatgaattgtagcgccaaataatccaaatgtatcaataatgacacccataataatttgacccgcaactgttgcaattacagttaatgttgcacctaattttggcaataacaataaattgccagttaaaaagctaaccccaagcaaaccaccgactacccatgtgtagttaaatgattgattattgtaaaagtgaatagtaaatacttctggattgataatgatatttaaaataattaaacaaattgttccaactgaaaatgaaatgaatgaagtatagaaaggcgatttagtatacagtgatagtcttgaattgacagatgtttggataggaataagcattccaactaggacaccaatgatatagaaaagaagcatatgaataaagtctcactttccaaagttaataataaaatcatatatttacattatcattatagagaaaatatacaactcatttacaataatgttgaaaaaaacaggacattattacaacaaaatcaccctagacaatcatgatgaaagtctagggtgttagtatttatactaaattaattgcgctttctttatatctatttcttatcttcaaataaaacagttgttgttttatcaataatttgagcagaatgtactttggtgatagtaccactatttgactttataatatttaaatctactaatgcattcatactatcacgtgcaacttgctcggtcactacgttgtttaattgtggtaattgcagttttacaggcttgtctagtgaagatttaaaacttaattcaagtgttttagtcatgaatatgtcctcctgattaaattgataaagatttgatgagttcgatattgctatatgtttctccagtaagtcgctcaataagtttgctgaatgttttaatttggtcgtttgatgcatcagggttaatgttagcgaatcgacgcttaaattctgtttgtttgccgttagcgtctactttagtaaatgataatacaatagtgatgtggtttattttactcatattttaaaacctcctttcacactatatatcgaaacaaaataataaaatggctaattttattttctatgtttaaaatctataaaaaaggcaatagatatatgtaactaaaatataatatagctatgattaagacacttaaagcaaggggaggttgagtaatgaataaagtagaagcgattaaatttaatgatgatattgttaaaatgtatgaagcgctcaagataaaatctgaacgtgactatttattctttaagttagctatacatagtggattgaaagtatcagaattattaacaattacagtctctcaagttaagagactaattgaaaagtgtacgttatcagaaatgtgtaaagcacattttcattcgttgattaaaattaggttaccagaaacattatcgaaagaactacttcaatatatagaggacaggagtctttcgaatgaagacgttctttttcaatcactacgaacaaatcaagtattatctagacagcaagcatatcgaataattcaccaagcatcaattgaagctggtatagataatgtaggactaacgacattgcgtaagacatttgcatatcatgcttatcaaaaaggtatacttataccagtcattcaaaagtatttagggcatcaatctgctattgaaacactaaattttatcggtttagaaaatgagtgtgaacatagtatttatatttcattacaattatagaaacaaaggaggctaataatgagtttggtttatttattaattgctatacttgtgattatggcgatgatacttctaatgtctaaacgtagagcattggctaaatatgccgggtacatagcgttggttgcacctgtaatttcatctatctattttttgattcaaataccatcagtagctaaactgcaatatctttctacctctattccatggattaagacattagatattaatttagatttacgtttagatggtttaagtttaatgttttctcttattatttcacttattggaattgcagtattcttctatgcaactcaatatttatcctctcgaaaagacaatttaccaaggttttatttttatttaacgttatttatgttcagtatgattggtattgtattatcagacaatacgatattgatgtacattttttgggaattaacgagtgtatcatcatttttattgatttcatattggtataacaatggtgacagtcaatttggtgcgattcaatcatttatgattacagtatttggtggattggcgttattagttggttttattatgctgtatatcatgacaggaacgaataacatcacagagatattaggacaagcagatcatattaagaatcatggattgtttatccctatgatttttatgtttttattaggtgcatttacaaaatcagcacaatttccatttcatatttggctacctagagcaatggctgcacctacacctgtaagtgcttatttacattcagccacgatggtaaaagctggtatctttttattacttcgatttacaccattattaggtcttagcaatatgtacgtatatatcgttacgtttgttggtttaataacaatgttatttggttcaattacagctttaaaacaatgggatttaaaaggtatcctagcgtactctacaatcagtcaacttgggatgattatggctatggtgggtataggtggcggatatgctcaacaccaacaagacgcaatagcatctatttatgtatttgtattatttggtgcgctatttcatctaatgaatcatgccatctttaaatgtgcgcttttcatgggagtaggtattttagatcatgaagcaggttcaagggatatacgaattttaagtggaatgcgtcaactatttcctaaaatgaatctagtcatgacgatagcggctctatctatggctggagtaccatttttaaatggatttttaagtaaagaaatgtttttagatgcattaacacaaactggacaattatcccaatttagtttgatttcaatgatagctatcgtgtttgttggtgttattgcgagtgtttttacattcacatatgcactatacatggtaaaagaagtattttggacaaaatatgattctaaggtttttactaaaaaaaatatccacgaaccatggttgtttagtttaccatctcttatattaatggtgctagtacctgtaatcttttttgtaccaaatatatttgggaaggggattatcgttctagcattaagagctgtatcaggtggtaatcatcaaattgatcaattggcaccacatgtttcgcaatggcatggatttaacataccgcttcttttaaccatcatcattattttattgggtagtgtactagcaatcaaagtagattggaaaaaagtgttcacaggtaaaattagacagatttcagtttcaaaaagctatgagatggtatatcgacattttgaaaagtttgctacgaagcgatttaaacgtgttatgcaagatcgtttaaaccaatacattattatgaccttaggcatatttatgattatcattggatatggttatattcgaattggacttcctaaagtacatcagttacatgtttctgaatttggggcattagaaattatattagcaatcgtaactgtcacaattggtatttctttaatttttatacgtcaacgactgacaatggtcattttaaatggagtcatcggatttgttgtgaccttattctttatagcaatgaaagcccctgatctagcattgactcagctagtagttgaaacaataacgacgatactatttattgtcagtttttcaagattaccaaacgtgccaagatctaacgctaacaaaaaaagagaaataattaaaatttctgtatcactcttgatggcacttattgttgtatcattaatttttattacacaacaaacagatggtttatcatcaatatcagacttttatttaaaagctgacaaactaacaggtggtaaaaatattgtaaatgcgatacttggtgactttagagcattagatacattatttgaaggattagtgttaattattactgggctaggtatttacacattattaaattatcaagatcggaggggacaagatgaaagagaatgatgtcgtgttaagaacggtcacgaaacttgttgtatttattttattgactttcggattctatgtcttcttcgcaggtcataataatcctggtggtgggtttattggtggtttaatatttagttcagcgtttattttaatgtttctggcttttaatgttgaagaggttttagaaagtttaccgattgattttagaattttaatgattattggagcattggtatcatctattactgcgataatacctatgttttttggaaaaccatttttgtctcaatatgaaacaacttggatacttccaattttaggacaaattcatgtaagtacaataacactttttgaattaggtattttattctcagttgttggtgttattgtcacagtgatgttgtcgcttagcggaggtcgatcatgaatttaatattattactagttataggatttttagtgtttataggaacatatatgattttatcaatcaatttaattcgtattgtaatcggaatttcaatatatactcatgctggtaatctcattattatgagtatgggaacgtatggttctagtagatcagaaccactaataactggtggaaaccaattgtttgttgatcccttgttacaagctattgtactaactgcaatagttatagggtttgggatgactgcgtttttacttgtacttgtttatagaacttataaagtaacaaaagaagatgaaattgaaggcctaaggggggaagatgatgctaagtaacttattgattttaccaatgttattaccattcctttgtgccttaatccttgtatttttaaaaaataatgatcgtatttctaaatatttatacttaggtacaatgactatcaccacaattatttcattaatgctattaatttatgttcagcgtcaccgtccaattacgctagactttggaggatggtcagcgccctttggtatacagtttttaggagattctttaagtttaattatggttacaaccgcttcgtttgtgattactttaattatggcatacggatttgggcgtggcgaacataaagcaaatcgttatcacttgccatcgttcatattatttttaagtgttggcgtgataggctcttttctaacatcagatttatttaatttatacgtcatgtttgaaattatgttactagcgtcatttgtactcattacacttggacaatctgtagaacaattacgtgctgcaattatttatgttgtcttgaatattattggttcatggctattcttattaggtataggtttactttataaaacagtaggtacattaaacttttcacatattgcaatgcgtttgaatgacatgggagataatcgcactgttacaatgatttcattaatcttcttagtcgcatttagtgcgaaagcagcgctggtcctttttatgtggctacccaaagcctacgctgtgttaaatactgagcttgcagcattatttgcagcgttaatgaccaaagtaggggcctatgcattaattcgattcttcactttactatttgatcaacataatgatctcatacatccattgctagcaactatggctgctataactatggtcatcggcgctataggtgtcattgcttataaagatattaaaaagattgcagcttaccaagtcataatctcaataggatttatcattttaggtttaggaacaaacacgtttgcaggtattaatggtgcaatattttatttggtaaatgacattgttgtaaaaacattgctattttttattattggtagtttagtttacattacaggctatcgacaatatcaatatttgaatggcttagctaaaaaagaacctttatttggagttgcgtttattataatgatttttgctattggcggcgtgcctccatttagtggctttccggggaaagtacttattttccaaggtgcattgcaaaatggcaattatattggactagcgttaatgattattactagtctaattgcaatgtacagtttatttaggatacttttttatatgtattttggagataaagatggggaggaagttaattttaagaaaatcccgctatatcgaaaaagaattttaagtattttagtagttgtggttatcgcaatcggaattgctgcacctgttgtgttaaatgttacaagtgatgcaactgagttgaacacgagtgatcaattatatcaaaaacttgtaaatccgcatttgaaaggagaggactaaatgaatcaaatagttttaaatattatcattgcattcttatgggtattatttcaagatgaagatcattttaaattctcgactttcttttctggatatctaattggtttaattgtcatttatatattacacaggtttttcagcgatgatttttatgttagaaaaatatgggtagctattaaatttttaggtgtttatttatatcaattaataacatctagcattagcacgattaattatattctttttaaaacaaaagatatgaaccctggattactttcatatgaaacaagactaacaagtgattggtcaataacatttttaacaattttaattattataactccagggtctacagtaatacgaatttctcaagactctaaaaagttttttattcatagtatcgacgtgtcagaaaaagaaaaagatagtttgttaagaagtattaagcattatgaagacttaatattggaggtgtcgcgatgatacaaacaataacacatattatgattattagttcactcattatttttggaattgcattaatcatctgtttatttagattaatcaagggacctacaacagcagatcgtgtcgttacatttgatacaacaagtgctgtcgtaatgtcaattgtgggtgtgttaagtgtacttatgggcaccgtttctttcttagattcaatcatgctcattgccattatatcttttgtaagttctgtttcaatatcacgctttattggtggggggcatgtgtttaatggaaataacaaaagaaatctttagtcttattgctgctgtgatgttgttgttaggtagttttattgctcttattagtgcaataggtatcgtgaaattccaagatgttttcttaagaagtcacgctgcgacaaaaagttcaactttatccgtgttattaactttaatcggtgtattaatttattttattgtgaatacaggatttttcagtgtgcgtttattactgtcacttgtttttattaatttaacttcaccagtcggcatgcacttagtcgctcgcgctgcttatcgcaacggcgcttatatgtatcgaaaaaatgatgctcacacacatgcatcaatattattaagttcaaatgaacaaaactctacagaagcattacaattacgtgctgaaaaacgagaagagcatcgtaagaaatggtatcaaaacgattgaagtgttggctaaattgttaagcataacaatgcttttgaaaatctgttttcaaaattaatcattaaaagagtactttgaaattggttagtcgattttaaggtgctcattttttgtattataagttaatgttgttatgtgaaagcaagttgtttatttatacaaacaattagtgataaaataaaattaaataattgcaaatttaagtactgcaatcgtagacatatatctatattaaagtgcttttgtggtcgctaactcaatttatcctctaaagtataattacaacgagatgtgatacttaattttcaattaaacaatactttttagagaggtgaaagtttggaaatatttgaaacaattcttatatttatagctgttgtgatactaagttcgtttgtccatactttcatacctaaagtacccctagcatttatacaaattttcttgggcatgttactatttattaccccaatccctgttcaatttaattttgattctgaattgtttatggtaacaatgattgcgcctttgttatttgtagaaggtgttaatgtttctagagtccatttaaggaaatatattaagccagtgatgatgatggcattaggattagtcattactactgtgataggtgtaggtttatttattcattggatttggccagatttacctattggagcagcatttgcaattgctgccattctttgtcctactgatgcagtagcagtgcaagcaatcactaaaggaaaggtcttgccaaaaggagcaatgacaattcttgaaggtgagtcattattgaatgatgctgctggtattatttcatttaaaatagctgttggagtattagttacaggtgctttttcacttgttgatgctgttcagttgtttttaattgcatcaattggtggcgcagtggttggtttacttataggtatggcattagtaaggttccgattaacattgatgcgtcgaggatatgaaaacattaatatgtttacaattattcaattgttaacaccatttgttacgtatttaattgctgaattgtttcacgcatcaggaatcattgcagcagtagttgcaggacttgtacatggtttcgaacgtgacagaattatgcaagtacgtacacaactgcaaatgagttacaatcatacatggaatatactaggttatgttttaaatggctttgttttttcaatattaggatttttagtacctgaagttattattaaaattatcaaaacagaaccgcacaatttaatctttttaataggcatcactattgttgttgctttagctgtctatctatttagatttgtttgggtttatgtcttatatccttatttttatttagccatcagtccattccaaaaaatgatgactaaaaatgatgatgataatccaacgactgagaaaccaccaaagcgaagtttatacgctttaattatgacgttatgtggtgtgcatggaacaatttctttagcaatcgcattaacgttaccgtattttttagcagggcatcatgcttttacgtatagaaacgacttattatttattgcatctggtatggttattattagtttggtagttgcgcaagtattattgccattattaacgaaacctgcacctaaaacagtaattggcaatatgtcgtttaaagttgctagaatttatatattagaacaagttattgattatctaaatcaaaaatctactttcgaaacaagttttaaatatggtaacgtgattaaagaatatcatgataaattagcatttttaaaaactgtagagaaagatgatgaaaactctaaagaattagaacgtctacaaaaaattgcttttaatgtagaaacaaaaacattagagtctttagtagatgaaggacaaataacgaatagtgtacttgaaaactatatgcgttatgctgaaagaacacaggtatatagacaagcatcattaataagaagaatgattgtattattacgaggtgctttattaaaacgaagagtacaaacgagagtgaactccgcatcttcacttagtgttacggataacttaatggaattaaataaaattaataaattagtccattataatgtggttagtcgtttgtctaaggaaacaacaaaagataatacacttgaagttggaatggtttgtgacggttatttaatgcgaattgaaaacttaacaccatcaaatttcttcaactcagcaagtgaagatacgattactaaaattaaattaaatgcattgagagaacaacgtcgcattttacgtgagttgattgatacagatgaagtatcagaaggtacagcgttaaaactaagagaagccatcaattatgatgaaatggttattgtagatagtatgacgtagttcctaattatgctaaaagggattgatgaaaaactgaagggcttttcatcaatcccttttattttaggggaattgaatagatagttttaaactatacgaattattaatatttgagatttaattgaaataagttttaaaaattggaggagatagattaagcgaagtcatttaaaggtgaagttaagtgtattcacaaaaaatagccacactcatatgacatcggatgagtgtggcttaaggatctatggggggaggaaaccatagatgtttactttgataggccagattaaatatcaaagtatgcgattatttatagcttgatgcaaaagtggtatgcctattaaaagttactgcacatagcttttaatattccgttcaaaggaaaggggcatacaattgaacaatctgtaatagtacttttaaccagctatgctaaaagtctagtagggagaacagttgtccaatcacataagaacctctaacttcgttagtacgattaagaaaagctttttagttagtatgtaatacaatttattgacgcgcgtgaatctcttttataagagtgtgtagggaatggcgttgtataaattgtattagaagaacttctaacgcatctctgtggttaaaagagatgaagggaacgacagtttaattaaaactgcataagaacttctagcttttctctctcgttcaaagagaagcagctgttcgcagtttaatcaaaaccacataaagcttttaactttactctttgatttaaagagtgataaatgtttacagtttaattaaaactgcataagaacttctagcttttctctttcgttcaaagagaagcagctgttcgcagtttaatcaaaaccacataaagcttttaactttactctttgatttaaagagtgataaatgtttacagtttaattaaaactgcataagaacttctagcttttctctttcgttcaaagagaagcagctgttcgcagtttaatcaaaaccacataaagcttttaactttactctttgatttaaagagtgataaatgtttacagtttaattaaaactgcataagaacttctagcttttctctttcgttcaaagagaagcagctgttcgcagtttaatcaaaaccacataaagcttttaactttactctttgatttaaagagtgacaaatgtttacagtttaattaaaactgcataagaacttctagcttttctctttcgttcaaagagaagttctaataccaccatatcgtgcgatcgggaacggtatatatattaataggagggtaatatatatttaacgcacgatatgggactattagccttcgactttgttatgttgatgtgtggcctaaaatattggagataccaatattttaggttgcatcaacatcaattcatcttacttcattaaaacacagcgtgttatttcatgcttccgtgtacagtttcaatatttgatttcatcattttgtagtaagagtcacctttagtgccttctttaccgattgaatctgtgtacacttcaccaaagatatctttcttcgtttcttcagataaactttccattgctttcttatcaacacttgtttctactaataagtgttttaatttgtgctttttaacaaactcaatagcttgtctcatttgttcaggtgtaccttgtttttcagtgttaatttcccaaatataacctggtgtaataccgtattgttttgagaagtacttgaaggcaccttcacttgtaatcatggcacgttgttcttttggaatgtcattaaatttgtctttactgtctttactgtcattatttaatttttccaattgagcaatgtatttgttaccttgcttttcataatctgctttatgttttttgtcgttatcgataaatgtttgttgaattgtttttacgtatttaataccgttatctaaacttaaccatgcgtgtggatcttgtttatctttgttgccttcttcaccgtttaaatagataggtttaacatcttttgatactgcgataacttttttatcttttaatgatttaccagcctgttctaaggctttttcaaaccaaccgttaccagtctctaaatttaatccgttgtataaaataacgtcagcgtcagttaactttttaatatctttaggtttaacttcatattcatgaggatcttgaccaacaggtacaatactatgaatatcgacgttgtctccaccaacatttttagccatatcatataaaattgaattcgtcgttactacttttaatttgccatttgacttatcactgctttgtttaccaccagtaccacatgcagcaactagaagtaataaggctaataataaaggtactaattttttcatgttaaacttcctcgtttctttctattcgtaaattttgtgaaaaataatgtgatgatataaattacaaacgtacaaagtacgattgtcgcaccactaggaatgttgtaaatatagctgtaataaagtccgacaattgaacttatgacacttattaaacttgctataatcatcattgagtatagttttttactaattaaaaatgctgtagatgcaggtgtaattaataatgcaactacaagaataatacctaccgtttgaatacttgctactgttactaatgagagtaacaacatcacaaagtaatgtaataacgtcgtatttagaccactcattctactaaacgttggatcgaatgtagaaatcattaatggacgatagaaaataatgattagaataaggacgattgaaccaatcacaatagttgttaaaaatgcactatttgtgattgccagtaaattaccaaacagaatatggtacaaatctgtcgtagtgtttattaagctaataataataatccccgaagctaagaaagcggtaaaactaattccaatagcggcgtcaggtttcgttttactactagatgtgatataaccgataaaaatacttgcgatcataccagttataagtgcgcctacaaacattggaataccaaataagaatgatagggcaacaccaggtaatactgcgtgactcattgcatctcccattaatgaaagaccacgtaatacaattaaactaccaactgtaccacaaactatccctacaataattgaagttatcaatgctcgattcaagaattgatatgtaaataaatgttcgacaaactctaacatgttatattgctcctttgactagggtcactacagtcagtgctactcataaatgtttcgtttaagcgagtgacactcatagcctcttcactatcaccaaagtatcgtaatgtttgatttaatagaataatgcgatcaaagtattgctttgcttttgatagatcatggtggatgataagaataagttttccttgttgttttaagttctcgatttttgtcatgattaatttttcgctactaaaatcaattccgacaaacggctcatctagaaaataaacttcactttcggacatcaatgctcttgctactagcacacgttgtaattgtccaccacttaattctgaaatttgtcgatgacgtaaagattctaattctaaatcgcttaataactgtttgagtttatcccttgctgatttattaggtcgtctaaaccatccaatttctttgtagcaacctgataaaatcacttgttccacacttataggaaaatctaaatcaatatgtgctttttgtggaatatatgtaatatgttgcagttgttgttgtataggtttgttatataacaatttagtaccggtagcattaaattcaccaattaaagacttgataagggaagatttaccagcaccattcgggcccatgataccaattatttcgccgcgtactggtatcgataaggaaatgtttttaagtacatgcttattacctaaaaacagatttaaatcttttgtttctaacaaacgtttatacctcctaattaaaagtttaggctaacctaattaattgtataataaactgagaatatttatcatgtcaagtaaattcgtgatataatatagacaatgtatgtgaggtgaaagtatgttaactgaagaaaaagaggactatttaaaggcaatccttacgaataatggcgataaaaactttgtgacaaataaaatcttatctcaatttttaaatattaagcctccatctgtaagtgaaatggtaggacgtcttgaaaaagcaggctatgttgaaacaaaaccatacaaaggtgttagattaacagaggatggtttaacgcatacgcttgatatcattaagagacatcgactattagaattatttttaatagaaatattgaaatataattgggaagaagtacatcaagaagcagaaattttagaacatcgaatttcagatttatttgttgaaaggctggatagcctgttaaatttcccagaaacttgcccgcacggcggtgtgattcctagaaataatgaatataaagagaaatatataacaacgattttgaattatgaacctggtgatatcgttacaatcaaacgtgtgagagataagaccgatttgctaatatatttgtctagtaaagatatttctattggtaatgaagtggaaattgtatcgaaagatgaaatgaataaagtaattatcattaaacgtaatgataatgtaattattgtcagttacgaaaatgcaatgaacatgtttgctgaaaaataaaataaagaagccataaagatatccatgattgaactgataaagacatatggataattgctttaggcttcttttttattagttaatttatcaagtgagtatatttgagtaaaatattcactgcataaagattgaagataatccagattgtactataaatgaagataggtacatgactgagttctttaagtgcactaccatcccactgtggactcggacgctggaaagtcaatttagcaatcgtccaactagattgtagaacttcgcctaataatacacctaaaatatattgataactcattgtgacaagtagttgaatttctactatattttcatcttttaatataaaatacaacatgatagaaattaaagttataacaacaatgggtgagccttttctagatgttaaaattaaaaaataaataaatatcaataaataggtaaatataaagaaactaggtatctgataatggctcgacgctaaacctatcaataacataataggtggcataaaataaccaccaatcgttgtaagccattggcctgctagatgtctagattgtgtaattgcgaatccttgttgtaatgtctgttgtcgctctcgtggacttgttacaatgactaaatcttttgcacggccaccagcgagtttattaaacagtacatgaccaaattcatgtgttaaaacagggatatagtttaaaatgacatctaaatagttcaaaacaggcttatgtctatattgatgaatagcaatataacaagctgcaacaataacgataatgtatatattaagttgaattgtcgtattaaaaaagtttgataaataattcattgttaacctcatataagatattaatttaaagtttgcttatcacttattataaatgatattggcatcaatagcgttagactttagacttaccttagttaaactaattttaatttttgaaaaggtgaatatgtgttaaaataaagcaaaatcatttcgatataaataggatgaatataaatactgttaatattgattacactaacataataatgaaataagataggagattcctgttatgactgttgaagaaagatccaatacagccaaagttgacattttaggggtcgattttgataatacaacaatgttgcaaatggttgaaaatattaaaaccttttttgcaaatcaatcaacgaataatctttttatagtaacagccaaccctgaaatagtgaattacgcgacgacacatcaagcgtatttagagttaataaatcaagcgagctatattgttgctgatgggacaggagtagtcaaagcttcgcatcgtttaaagcaacctctagcgcatcgtatacctggtattgagttgatggatgaatgtttgaaaattgctcatgtaaatcatcaaaaagtatttttgctaggggcaactaatgaagttgtagaagcggcacaatatgcattgcaacaaagatatccaaacatatcgtttgcacatcatcacggttatattgatttagaagatgagacagtagtgaaacgaattaaactgtttaaacctgattacatatttgtaggtatgggattccctaaacaagaagaatggattatgacacatgaaaaccaatttgaatctacagtgatgatgggcgtaggtggttctcttgaagtatttgctggggctaaaaagagagcgccttatatctttagaaaattaaacattgaatggatatatagagcattaatagattggaaacgtattggtagattaaagagtattccaatatttatgtataaaatagccaaagcaaaaagaaaaataaaaaaggcgaaataatcatgatgacaaaaataaaaccgaggaaatccttaaatggagattctcggttttttcggtttatttaataacgaagcgggactcatcgagtttgtttctaaattctttttgttcggctttggatttctttttaaaatcgttaaggaaagcttcatatttaggtaatacatcatcaagttcaccgtaatcttttaactttccgccttcaatccaagcaatcttagtacaaaattgtctcacttgtcctaagttatgactaacgaaaaagatggttttgttttgctctttaaactcgtaaattttatctaaacatttttgtgcaaaagtttggtcacctacagataaagcttcgtcaatgactaagatatctggattaactgtgatattaattgaaaaaccaagttttgcacgcataccacttgaatactttttaactggttgataaataaactcaccaagttcactaaattcaataatcttaggtgtcatcgctttaatttcttttcgcttaaagcccatacataacattttaaattcgatattttcaatccctgtaagttgtccactcaagccagcactaattgcgataacgctgacttcaccattacgatccactttgccaacagtaggcgacaaagaaccgccaatgatattgctcaacgttgatttgccggaaccattgatgccaacaagccctatgacgtcaccttcatatgcttttaaactaatgtcatctaaagcgaaaaatgttttgtttttatgtttgggaatgagcgcatctttcatacgttctttatttgtacgataaatacgatattcttttgttacatttttaatgtttaccgaaacgttcatttgtagaccttccttattcacatttatctagattataatatactactcaacagttgttaaattttaaaacctgttgtaaagtgtatagaagattttgttattatcagagtgggtgttttgacacaaaatgttaatcatcaatgataacaatgatatttaaaaactaaacttatttcaacttacatgattgtatactataatgtatttgtaataaactaatattttaaagaactagacaataattttgatagcatccatgtatagtgatagtatttacaacaattattataatactatttagttaagtagagaaatagttaaacatttgaaagtgtggtttaatggaatgtcagcaataggaacagtttttaaagaacatgtaaagaacttttatttaattcaaagactggctcagtttcaagttaaaattatcaatcatagtaactatttaggtgtggcttgggaattaattaaccctgttatgcaaattatggtttactggatggtttttggattaggaataagaagtaatgcaccaattcatggtgtaccttttgtttattggttattggttggtatcagtatgtggttcttcatcaaccaaggtattttagaaggtactaaagcaattacacaaaagtttaatcaagtatcgaaaatgaacttcccgttatcgataataccgacatatattgtgacaagtagattttatggacatttaggcttacttttacttgtgataattgcatgtatgtttactggtatttatccatcaatacatatcattcaattattgatatatgtaccgttttgttttttcttaactgcctcggtgacgttattaacatcaacactcggtgtgttagttagagatacacaaatgttaatgcaagcaatattaagaatattattttacttttcaccaattttgtggctaccaaagaaccatggtatcagtggtttaattcatgaaatgatgaaatataatccagtttactttattgctgaatcataccgtgcagcaattttatatcacgaatggtatttcatggatcattggaaattaatgttatacaatttcggtattgttgccattttctttgcaattggtgcgtacttacacatgaaatatagagatcaatttgcagacttcttgtaatatatttatatgacgaaaccccgctaaccattaataaatggaagtggggttcatttttgtttataatttaagtaaataacatattaagttggtgtattatgaacgttttaataaagaaattttatcatttggtagttcgaatactttctaaaatgattacgcctcaagtgattgataaaccgcatatcgtatttatgatgacttttccagaagatattaagcctatcatcaaagcattaaataattcgtcgtatcagaaaactgttttaacaacaccaaaacaagcgccttatttatctgaacttagcgacgatgttgatgtgatagaaatgactaatcgaacattggtaaaacaaattaaggctttgaaaagcgcgcagatgattattatcgataattattacctattgctaggtggatataataagacttctaatcaacacattgttcaaacgtggcatgcaagtggtgcattaaaaaactttggcttaacagatcatcaagtcgatgtgtctgacaaggcaatggttcagcagtaccgtaaagtttatcaagcgacggatttttacttagtgggttgtgaacaaatgtcacaatgttttaaacagtctttaggtgcaacagaagagcaaatgctgtattttgggcttccgagaattaataaatattacacagctgatagagcaacggttaaggcagagttaaaggataaatatggaattacaaataagttggtattatatgtaccaacatatagagaagataaagcagataatagggctattgataaagcttattttgaaaaatgtttaccaggatatacactgattaataaattacatccatcaattgaagattcagacattgatgacgtatcttcaatcgacacgtctacattaatgctaatgtcagatataattattagcgactatagttcgctgccaatagaagctagcttgttagatattccaactatattttatgtgtatgatgaaggaacatatgatcaggtgagaggcctgaatcaattttacaaagcaataccggatagctacaaagtgtatactgaagaagatttaataatgacgatacaagaaaaagaacatctattaagtccgttatttaaagattggcataagtataatactgataaaagtttacatcagctcacagaatatatagataagatggtgacaaaatgaggtttacgataatcatacctacatgtaataatgaggcaacaattcgacaattgttaatatctattgagagtaaagaacactatagaatcctttgtattgatggtggttctactgatcaaacaattcctatgattgaacggttacaaagagaactcaagcatatttcattaatacaattacaaaatgcttcgatagctacgtgtattaataaaggtttgatggatatcaaaatgacagatccacatgatagtgacgcatttatggtcataaaaccaacatcaatcgtattgccaggtaaattagataggttaactgctgctttcaaaaataatgataatattgatatggtaatagggcagcgagcttacaattaccatggtgaatggaaattgaaaagtgctgatgagtttattaaagacaatcgaatcgttacattaacggaacaaccagatttgttatcaatgatgtcttttgacggaaagttattcagtgctaaatttgctgaattacagtgtgacgaaactttagctaacacatacaatcacgcaatacttgtcaaggcgatgcaaaaagctacggatatacatttagtttcacagatgattgtcggagataacgatatagatacacatgctacaagtaacgatgaagattttaatagatatatcacagaaattatgaaaataagacaacgagtcatggaaatgttactattacctgaacaaaggctattatatagtgatatggttgatcgtattttattcaataattcattaaaatattatatgaacgaacacccagcagtaacgcacacgacaattcaactcgtaaaagactatattatgtctatgcagcattctgattatgtatcgcaaaacatgtttgacattataaatacagttgaatttattggtgagaattgggatagagaaatatacgaattgtggcgacaaacattaattcaagtgggcattaataggccgacttataaaaaattcttgatacaacttaaagggagaaagtttgcacatcgaacaaaatcaatgttaaaacgataacgtgtacattgatgaccataaactgcaatcctatgatgtgacaatatgaggaggataacttaatgaaacgtgtaataacatatggcacatatgacttacttcactatggtcatatcgaattgcttcgtcgtgcaagagagatgggcgattatttaatagtagcattatcaacagatgaatttaatcaaattaaacataaaaaatcttattatgattatgaacaacgaaaaatgatgcttgaatcaatacgctatgtcgatttagtcattccagaaaagggctggggacaaaaagaagacgatgtcgaaaaatttgatgtagatgtttttgttatgggacatgactgggaaggtgaattcgacttcttaaaggataaatgtgaagtcatttatttaaaacgtacagaaggcatttcgacgactaaaatcaaacaagaattatatggtaaagatgctaaataaattatatagaactatcgatactaaacgataaattaacttaggttattataaaataaatataaaacggacaagtttcgcagctttataatgtgcaacttgtccgtttttagtatgttttattttctttttctaaataaacgattgattatcatatgaacaataagtgctaatccagcgacaaggcatgtaccaccaatgatagtgaataatggatgttcttcccacatacttttagcaacagtatttgccttttgaataattggctgatgaacttctacagttggaggtccataatctttattaataaattctcttggatagtccgcgtgtactttaccatcttcgactacaagtttataatcttttttactaaaatcacttggtaaaacatcgtaaagatcattttcaacataatatttcttaccatttatcctttgctcacctttagacaatatttttacatatttatactgatcaaatgagcgttccattaatgcattccccatcatattacgttgcttctcgccaccaaggtttttatagtctcctgcacccatgataacttgattaattctaaatttacctcgtttggtagtaatcgtatggttgtaatttgctgtatcacttgatccagtttttaaaccatctgtacccggcaaactcatttttgcaccttccaatgaaaagttgaatgtgtaatacgtaactgcatgcgttgttggtgctaactgctttgtaaagtctaatattttaggtgtctctttaatcacgtgtaaatctaaaatggcatagtctctagcagtcgttacagtacgttcttggtctttatactttgttggtgcaaatgtacgtaatcttgaattttcagcacccgttggattgacgaaatgtgtatttttcattccgatagctttagctttgttattcattaaatcaacgaaatcgctggtgttttttgaaaccttcttagctaaaattaatgccgcggcattactagaattagatactgtaatttgtaataggtctgcgattgtccatacttgtccaggatatagtttcgtattactcaactcaggtagtgtagacataatatattctttgttcgtcattgtgactgtgtcatcaagtgaaagctgccccttatttacagcttccaatgttaagtacattgtcattaatttagtcatagacgctggattccacttagtatcgatattgtattgatacagtaattgtccagtttgacttacattaacagcactcgtcggttcgtatgcagccgacaaacctgcataaccatattgatttgctgcttgtacaggggttacgtcactgttagtagcttgtgcatatggtgtcataatacttaatgttaaacataaaatgatgataatagatattaaatttttcataaagcgttaatcttcccttttccaattcttaaatattccctaaaagcaatggttattcctacttacggaaatcattgctaattcacttcaccttaattaaattgttgaaaataaagttttctgcagttaatttgaaaaataatgcaaatatattacgtgtgtagctaaaggtgttataatgtttgtacgaagagcaaacttactcaaaagcgattaattttcatgttttaatataaagactttgagaagttattacaaaaaatgcaatagaaatattctatcatataaatgttatgagcggtattttggggcaacactttatttgatttttaaagttttgttgggagaaagtatatgatagaaatgcatgtatctatctaaatgaattaactataaatttcaaacagaagaggtaaaactatgaaacgagaaaatccattgtttttcttatttaaaaaactatcatggccagtgggtcttatcgttgcagctatcactatttcatcactagggagcttaagtggactattagtgccactgtttactggacgaattgtagataaattttccgtgagccatatcaattggaatctaatcgcattatttggtggtatctttgtcatcaatgctttattaagcggattaggtttatatttattaagtaaaattggtgaaaagattatttatgcgatacgctcagttttatgggagcatatcatacaattaaaaatgccattctttgacaaaaatgaaagtggtcaattaatgagtcgattaactgacgatacgaaagtgataaatgaatttatttcacaaaagctacctaacttattaccatcaatcgttacattagttgggtcactaatcatgttatttattttagattggaaaatgacattattaacatttataacgataccgatattcgttttaattatgattcctctaggtcgtattatgcaaaagatatcgacaagtacacaatctgaaattgcaaacttcagtggtttgttagggcgtgtcctaactgaaatgcgtcttgttaaaatatcaaatacagagcgtcttgaattagataatgcacataaaaatttgaatgaaatatataaattaggtttaaaacaggctaaaattgcggcagttgtacaaccaatttcaggtatagttatgttgctaacaattgcaattattttaggttttggtgcattagaaattgcgactggtgcaatcactgcaggtacattaattgcaatgatattttatgttattcagttatctatgcctttaatcaatctttccacgttagttacagattataaaaaggcagtcggtgcaagtagtagaatatacgaaatcatgcaagaacctattgaaccgacagaagctcttgaagattctgaaaatgtattaattgatgacggtgtattgtcatttgaacatgtagactttaaatatgatgtgaagaaaatattagatgatgtgtcgttccaaatcccacaaggtcaagtgagtgcttttgtaggcccttctgggtctggtaaaagtacgatatttaatctgatagaacgtatgtatgaaattgagtcaggtgatattaaatatggccttgaaagtgtctatgatatcccgttatctaagtggcgacgcaaaattggatatgttatgcaatcaaattcgatgatgagtggtacaattagagacaatattttatacggaattaatcgtcatgtttcagatgaagaacttattaattatgctaaattagcgaactgtcatgattttatcatgcaatttgatgaaggatatgacacgcttgtaggtgaacgaggattgaaactgtctggcggacaacgtcaacgtattgatattgctagaagttttgttaaaaatcctgatattttgttacttgatgaagcaacagctaatctcgatagtgaaagtgaattgaaaattcaagaagctttagaaacattgatggaaggtagaacaacgattgtcattgcgcatcgtttgtctacaattaaaaaagccggtcaaattatattcttagacaaaggacaggtaacaggtaaaggtacgcattcagaactgatggcatcacatgcgaagtataaaaactttgtagtgtctcaaaaattaacagattaattttatatatataagtaagcttggagcaaatacacatataccatcgaggaaattaaagtgtggcacattgatggatatagatgttaataaattgcttcaagcttttgtctattttaaatcatttgagaagttacgacataataattcttaaattaatgaaatcgatattttaagaaaaaaatgctcatggtataatacaagttataagcaaacatacatatattaaatactgtagccacgagtcataattcttcatattttacatagcaatttaactgattttagagtccacggtacagaagtttgatatttcaatgtttctaaatttttaaaaaattaaatcataggtgggtgccaaatgtttttattaatcaacattattggtctaattgtatttcttggtattgcggtattattttcaagagatcgcaaaaatatccaatggcaatcaattgggatcttagttgttttaaacctgtttttagcatggttctttatttattttgattggggtcaaaaagcagtaagaggagcagccaatggtatcgcttgggtagttcagtcagcgcatgctggtacaggttttgcatttgcaagtttgacaaatgttaaaatgatggatatggctgttgcagccttattcccaatattattaatagtgccattatttgatatcttaatgtactttaatattttaccgaaaattattggaggtattggttggttactagctaaagtaacaagacaacctaaattcgagtcattctttgggatagaaatgatgttcttaggaaatactgaagcattagccgtatcaagtgagcaactaaaacgtatgaatgaaatgcgtgtattaacaatcgcaatgatgtcaatgagctctgtatcgggagctattgtaggtgcgtatgtacaaatggtaccaggagaactggtactaacggcaattccactaaatatcgttaacgcgattattgtgtcatgcttgttgaatccagtaagtgttgaagagaaagaagatattatttacagtcttaaaaacaatgaagttgaacgtcaaccattcttctcattccttggagattctgtattagcagcaggtaaattagtattaatcatcatcgcatttgttattagttttgtagcgttagctgatctatttgatcgttttatcaatttgattacaggattgatagcaggatggataggcataaaaggtagtttcggtttaaaccaaattttaggtgtgtttatgtatccatttgcgctattactcggtttaccttatgatgaagcgtggttggtagcacaacaaatggctaagaaaattgttacaaatgaatttgttgttatgggtgaaatttctaaagatattgcatcttatacaccacaccatcgtgcggttattacaacattcttaatttcatttgcaaacttctcaacgattggtatgattatcggtacattgaaaggcattgttgataaaaagacatcagactttgtatctaaatatgtacctatgatgctattatcaggtatcctagtttcattattaacagcagctttcgttggtttatttgcatggtaatatgtcgaagagtgactatgataatacattttaactaataaatatgtccaggcatgtcgtctattgatataggtgagatgcttggacttttttattattgatataaaggtatttaaatatttttaaagttaccgaaattgaagcattataaaaaccaagtgcacatggtaatacacttggcttttatgggaaatgaatattattgtacatatgacagtaaggactaggtacagtcatagtacttcgagcaaaatttgttttgttattataaacaacacaaaggagataacttctctattgaagaagttaaaaacattatagcagacaatgaaatgaaagtaaattaaaaattcagaatatttttaattattatattgtgagtgatatttattagggaaagctattcttcatataaattagttaaatagtaaatctttgttagaactctttccatagagttgtgacagcatttttgttgtgctactatttttatagtctaataaatatataaaggggatggtttcgtgaataaaacggttaaagatttaatactagttgtcttaggttcatttatctttgctgcaggtgtaaatgcatttattatttctggtaacttaggtgaaggcggggttacaggtttagcaattattttatattatgcgtttcatatttcaccagccatcactaacttcttggtcaacgcagtattgattgccataggttataaatttttgagtaagagaagtatgtacttaactattcttgtaacaattcttatttcaatatttttgagtttaacagaatcatggcaagtagaaactggaaacagcattgtgaatgccatttttggtggtgtaagcgttggactaggaatcggagtaattatccttgcaggcggtacaacagcaggtacaacaattttggcgagaattgcaacgaaatacctcgatgtaagcacgccatatgctttgcttttcttcgatatgatcgttgttgcaatttcacttacagttattccacttgataaagtattagtaacagtaatatcactttatataggaacaaaagtgatggaatatgtcatagaaggtttaaacactaaaaaagctatgacgattatttcaactaatcccgacaaacttgccaaagcaatagacgagcaaattggaagaggtttaaccattttaaacggacatggctattatacgcgtgaagaaaaagatgtcttatacgttgttatttctaaaacacaagtttcaaaagcaaagcgattaattaaacaaatcgataaagatgcattcctcgtaattcatgatgtaagagatgtctatggtaatggctttcttgcagatgaataaataaatggtatgagcacacatacttaaatagaagtccacggacaagtttttgaactatgaagacttatctgtgggcgttttttattttataaaagtaatatacaagacatgacaaatcgagctatccaatttaaaaagtaatgttagtcaataagattgaaaaatgttataatgatgttcatgataatcattatcaattgggatgtctttgaaaattgataatttaaaaatagaaattattttttataaacagaaagaattttattgaaagtagggaaattatgaatcgtttgcatggacaacaagttaaaattggttacggggataacacgattataaataaattagatgttgaaataccagatggcaaagtgacgtcaatcattggtcctaacggctgcgggaaatctactttgctaaaggcattgtcacgtttattggcagttaaagaaggcgaagtatttttagatggtgaaaatattcatacacaatctacgaaagagattgcaaaaaaaatagccattttacctcaatcacctgaagtagcagatggcttaactgttggggaattagtttcatatggtcgttttccacatcaaaaaggatttggtagattaactgctgaggataagaaagaaattgattgggcaatggaagttacaggaactgatacattccgacaccgttcaatcaatgatttaagtggtggtcaaagacaacgtgtttggattgcaatggcattagcacaaagaactgatattatctttttagacgaaccaacaacatatttagatatctgtcatcaattagaaatactagaattagttcagaagctaaatcaggaacaaggttgtacaattgtcatggttcttcatgatatcaaccaagcgattcgtttctcagatcatcttattgcgatgaaagaaggggatatcatcgctacaggttcaacagaagacgtattaacacaggaaatattagaaaaagtttttaatattgatgttgttttaagtaaagatcctaaaactggaaaacctttactggtaacttatgacttatgtcgcagagcttattcttaattaagtaagttaatatgataaaaaggacaattaacatgacaaatagagagaacccaacgccattgaagtttttatcctatattataggtttaagtatgatactactaatcacactatttatttctacattaataggtgacgccaaaattcaagcctctacaattatagaggctatttttaattataatcctagcaatcaacagcaaaacatcatcaatgagattaggattcccagaaatatagcagcagtaattgtaggtatggcgcttgcagtttctggtgcgattatacaaggtgttactcgtaatggtcttgctgatccggcgctcataggtttaaattcaggtgcttcatttgctttagcattaacatatgcagttttaccaaacacttcatttttaatattgatgtttgctggatttttaggtgctattctaggaggtgctattgtattaatgataggccgatctagacgtgatggatttaatccgatgcgtattattttagcgggtgcagcagtaagtgctatgttaacagcgctaagtcaaggtattgcattagcttttagactaaatcaaacagtaacattttggactgctggaggcgtttcaggcacaacatggtcacaccttaagtgggcaattccattaattggtattgcgttattcattatattaacaattagtaaacaacttaccattttaaatcttggtgaatcattagctaaaggtttaggtcaaaatgtaacaatgatcagaggcatatgtttaattattgctatgattctagcaggtattgcagttgctatcgctggacaagttgcatttgtaggtttgatggtacctcatatagcaagatttttaattggaactgattatgctaaaattctaccattaacagccttgttaggtgggatactcgtgcttgttgccgatgtgatagcacgatatttaggagaagcgcctgttggtgcaatcatttcatttatcggtgttccttactttttatatttagttaaaaaaggaggacgctcaatatgattagttcaaataataaacgcagacaattgatagcactggctgtttttagcattctactatttctaggttgtacttggagtattacctcaggtgaatacaacatacctgttgaaagatttttcaaaactttaattggacaaggtgatgccattgatgagttaatcttattagatttcaggttacctcggatgatgattactattttggctggcgcagcgcttagtattagtggtgcaatagtgcaaagtgtcacaaaaaatccaatagctgaaccaggtatattaggtattaacgcaggtggcggatttgcaatcgcattatttattgcaattggtaaaattaatgctgacaactttgtttatgtactgccgttaataagtatactaggtggtatcaccactgcattgattatttttattttcagttttaataaaaatgaaggtgttacacctgcgagtatggtattaataggtgtaggtttacaaacagcattatatggtggctcaattacaattatgtcaaaatttgatgataagcaatctgatttcatcgctgcttggtttgcaggtaatatttggggtgacgaatggccatttgtcattgcatttttaccgtgggtgttgattattattccttacttactatttaaatcgaatacactaaatattattcatacgggtgataatattgcacgaggtctaggtgtaaggttaagcagagaacgtttaatattattctttatcgcagtgatgttatcatctgctgctgtagcagtagcaggttcaatttcgtttatcggattaatgggtccgcatattgccaaacgtatcgttggaccacgtcaccagttgtttttaccaattgccattttagtaggggcatgtttacttgttatagctgatacaattggcaaaattgtattacaaccaggtggggttccagcaggtattgtcgtagcaattattggtgcaccgtatttcttatatttaatgtacaaaacgaaaaatgtatagtgtcaatggacacaacttattgctatgaaaggcactttattataaggcttttcatagcattttttatttaatgagccactcaagactatttattttttcaataatgaaccattaagttatcaagaggatcttatcaaaaatatatttgataacggtatcaggttaattctttatgatagcgcattcatttattctgttttatactatgactgataataccaaggaggtacaacatgatgaaaaagttaatcaataaaaaagaaacatttttaactgatatgcttgaaggattgttaattgcgcacccagagttagatctgattgctaatacagttattgtaaaaaaagctaagaaagaacatggtgtagcaatagtctctggaggtggaagcggacatgaacctgcgcatgccggttttgttgcagaaggtatgctagatgcagcggtttgtggcgaagtatttacatcacctacacctgataaaatattagaagctattaaagcagtagatactggtgatggtgtattactagttgtaaaaaactatgcaggtgacgtgatgaatttcgaaatggcacaagagcttgcagaaatggaaggtataaatgttcaaactgttattgttcgtgacgacattgctgtgacaaacgaagtacaacgtcgtggtgttgcaggaacagtgtttgttcataagcttgccggttatcttgctgaaaaaggttattcattaacagagataaaatcgcgtgtagaagcgttgttacctgaaattaaaagtattggtatggcaattgagccaccgcttgttccaactactggaaaatatggctttgatattgaagacgacaaaatggaaatcggtattggtatacatggtgaaaaaggtattcatagggaagaagtaaaggatattgatcatattgttggaacattgttagacgaattgtataaagaagttactgccaatgatgtcatattaatggtaaatggtatgggtggtacgccgttatctgaattaaatatcgtaactaaatatattcaacaaaatttagctgcaagaacggttaatgttgctaaatggtttgttggtgattatatgacatctttagacatgcaaggtttttctataactatcgtgcctaataaaccagaatatttggaagcatttttagcaccaacaacaagtcaatactttaaataagaagtgaatatgaataaatatacatttatgaggtggcacaaatgaaagtgaatgatatgaaagcacgtttattaaatttagaagaaacgtttaaaaaacatgaatctgaattaactgaattagatcgagcaattggtgatggtgaccacggggttaacatggttcgtgggtttagtagtcttaaagacaaacttgatgatagctcaatgcaatcattgttcaaatcaactggtatggcattgatgtcaaatgttgggggtgcatcaggaccactgtatggctttagctttgttaaaatgtctgcagtcaccaaagatgatatggataatcaagatttcattacactaattcaggcatttgccgaagcggttgaatcacgtggtaaagttactttaaatgaaaagacaatgtatgatgtagtagcgcgagcagcagagaagcttaaaaatggtgaaactttaacattcaatgatttacagcaattagcagataatacaaaagatatggtagcaacgaaaggtagagctgcatattttggagaagaatcaaaaggttatattgatccaggtgctcaaagtatggtttatattttaaacgctttgattggagatgaagataatgcctaaaattatacttgttagccacagtaaagaaattgcaagtggtacaaaatctttgttaaagcaaatggcaggtgacgttgatattataccaatcgggggattaccagatggttcaattggaacttcatttgatatcatccaagaagttttgactaaattagaggatgatgcattgtgtttttacgatattggatcttcagaaatgaatgtagatatggcaattgaaatgtatgatggtaatcatcgtgtgttaaaagttgatgcaccaattgttgaaggcagttttatcgcagcagtaaagctatcaatcggcggttcaattgatgatgcattagcagaaatcaaacaatcattttagttaaaatttactaataatgaaaaatgtaaacctttttcaaatgaaactttataaaaaatatgatagtatatatgtaaatgtttaataaaatctggagaaataggaggacattgccatgcaacaccttataaaaaaacatgtattgaatggcgagtttgatttagtacgacaattgatgtccgaaacagattttatggaatttgaagaagcatatatttcaagtgcgcatgaagtagaaagtatgatgttttatacatgtattttagatatgattaagtacgaagaatcatctgaaatgcatgacttagcatttttattgcttgtgtatccactaagtgaatatgaaggtgctttggattctgcttattatcatgcagacgcttccataaaacttactgacggcaaagaagttaaaagtttgttacaaatgttattattgcatgcgataccaacacctgttatttcagataagaaggcttttgatatcgccaagcaaattttaaaattagatcctaataataatgttgctcgtaacgtcttaaaagacactgccaaacgtatggacaacgttgttgttgatataaatgaattacaccaacgtaatgcacgttaattacatttcaattatattagcttaataatagttttaacatttggttgggttgggcatatgttccagccttttttaatacttaaaaactaacgaagtatacttgtgtgcacaaatggtttttatacaacattttataaatttatacattttaataaagaacatacgatagatggtttaaaccttgttaactgagaaattttgatatgtattcttcgaaatttaactaaatatacgaaattcaagaagcacaataattaatcatttttcctatacaaaagttcgtatgactgcattataaaagcataaatttataatttttttaaatgtcattgaacgtgataatgtgaatggattgagcaattttgaaaaagtgaaaaataacctatgcgacttgcaattaattttcagtacgttataatgcacactgtgcaaaattaaggaggtctattattcacatgatgatgaataaagaagcaacaaaaattggatttgcctacgtcggcattgtagtgggcgcaggattttcaactggacaagaagttatgcaatttttcactaaatatggcttgtgggcttatttaggtgttattatatctggttttattttagcttttattgggcgccaagtagcaaaaattggtactgcctttgaagcgacaaatcatgaatcaacattacaatacgtattcggtgaaaagtttagtaaagtctttgattatattttaatcttcttcttatttggtatagctgtaaccatgatagctggtgcaggcgcaacatttgaagaaagttataacatacctacatggctaggtgctttaattatgacattagcgatttatattacgttgctattagactttaataaaatagtacgtgcactaggtatcgttacaccatttttaattgttttagttgtattaatcgctggcgtttatttatttaaaggtcatgtttcattagcagaagttaaccaagtagtgcctgaagcaagtatttggaagggaatctggtttggtacaatatatggtggattagctttttctgtaggttttagtaccatcgtagcaatcggtggggatactgaaaagcgtacagtgtcaggtgcaggcgcgatgtatggtggtattatctatactgtattactagcattgatcaactttgcattgcaaagtgaatatccaactattaaaaatgcctcaattcctacattgacgttagcaaataatatccatcctttaatagcaacagtgttatctgttattatgctggcggttatgtataatactattctaggactaatgtattcatttgcagcacgttttacagaaccatacagtaaaaattatcatatctttattattataatgatggtagcaggttatttattaagtttcgtaggatttgctgaattaattaataagttatatacaattatgggatatgtaggcttatttattgtagtagctgtaattattaaatatttcaaacgtaaaaatgcggataaaaaacatattgcttaatatcatatgagggatatccgaaactttacaattgaatcactttgttttaaccttaaaagcaattcgtctctactcttatcgggcgaattgctttttatatttattcagtctattaatatgagcgtctaacaaatagagaggtacgatgtaatgaataaagataataaatggacgatgataactgcgctttttataactgtaatcagtgtattgttagcatttcatctgaaacaacattatgaccaaattacaaatgagaaccatgctaataaagacaaaattaatattaaaaataaaaatgtgcgcatttatcaaaaccttacatacaatagagttttccctaacagtaaattagatattattacacctgttgatatgtcttctaatgccaaactgccagttattttttggatgcacggtggtggttatattgcgggtgataagcagtataaaaacccattattagcgaaaattgctgaacaagggtacattgttgtgaatgtaaattatgcattggcgccacaatataaatatcccacaccattaattcaaatgaatcaagcaactcaattcattaaagaaaataaaatgaatttacctattgattttaatcaagtaattattggcggtgattctgcaggtgctcaattagctagccaatttacggcaatacagacgaatgatcgcttaagagaagccatgaaatttgatcagtcattcaaaccatcgcaaattaaaggtgctatactatttgggggtttttataatatgcaaacagttagagaaactgagtttccaagaatacagttatttatgaaaagttatactggcgaagaagattgggaaaagagttttaaaaacatttcacaaatgtcgacagtaaaacaatcgacaaaaaattatccaccaacatttttatctgttggagatagcgatccattcgaaagtcaaaatatagaattcagtaagaaattacaagaattgaatgtaccagtagatactttgttttatgatggtacgcatcatttacatcatcagtatcaatttcaccttaataaacctgaatcgatagataatatcaaaaaagtgttacttttcttaagtcgtaatacatcctctagtggtattcaaactgaagagaaaccacaaatagaaaatccgagtaatgaattaccgttaaatcctttaaactaatgataaacagtagtaatttattacttaagcaacatttaagattttcaaattaaaaacgaagaatttaaaacatgtggtgctaatgtgtaagagtctgagatataataaattgttagcggttctttatcatttctatctcactctattatgatgtgacatttattttacaaactaatttgttttgaacctgaaaataactttttacaactaaattgtcgaaaaacagtgtgtacatgatataataaatttataaattgaaaagaattcaaaagaaaaattaaaatatagattgagcacgaagtgatttgaaataaggttgtgaaagggaatgacaaggtcagcattaaaaccatttaaaaataaacgcgttatggttactggacgtatacaacgtgttttgtttaaaaattatttagatagacatagcacatttaagccgaatgtaaggatattattaaaagatgtatttgtttcaggtgtatcaatagatcatttatggttatatgagacaaataaatactatgcattggcaatggaacttattcatcaacgagtaaaatttagtgcgaatgttgtaccgtattacaaaataaatagaaataataatttattcgtacaagattatggaattaagcgtaaaggtaggttaattactgaagaagcttacaatcaaaacaatcagtatcaggataagatatatgaaaaattaccggatatagattttagactcgaagatttttatagtaaggaaaactaaacaacatatataaagcaccactaatcgtagttgatagttaatcaattacacattagtggtgttttattttgaatttaaatttgataaatgaataagagtgtacgtatttatttgagattagataacattgataagtatgagtaatgtattaggtaaccattaaattcgttgttatacgattctgatacaagattatgataaaatagctttaattaagaattttagccatcatatagtcatcataatatttaccatcgataaataacttatcttttaaaacgccttcgatttgaaaatcggcacttttaaaaagctcgagggcaggttggttattgagtggtacatttgcttcaattcggtgtatttgattgtttaaacaccaagccataatggcatcaagaagtgcttggccaattccacgatgttgatataatttctttacacctaaatcaattttagcaacatgtttaatgcgttgaaatggtgtcgtattaacaaaggcaaagccaacgagttgttcatcactttcagcaacgaagatgactttatgcggagaagtgatatattcttctaattgtttactagccgatgtgacgctaggatcatattctcctggtgtgtagaacatatacggagattcgtcgtatatgttcgctaacattgaaatgaaattttctacatctttgatactaactctacgtataatatgggccataaaaagcctccagtattttgaaattttaaaacatttgctactattataatatatatgtaactaaaaggtggagtaatatgttttttggttacagtttaaaggagtattttagatgaaacctaaagttttattagcaggtggaacaggatatattggtaagtatttaagtgaagtgattgaaaatgatgctgaactttttgctatatcaaaatatccagacaataaaaaaacagatgatgttgaaatgacttggattcagtgtgatatatttcattacgaacaggttgttgcagcaatgaatcaaatagatattgctgtattctttatcgacccaacaaagaattctgccaaaataacacaatcatcagcaagagatttaacattaatcgcagcagataattttggtcgagcagcggctatcaatcaagtaaaaaaagtaatctacatacctgggagtcgttatgataatgaaacaattgaacgcctaggtgcatatggtacacctgtagaaacaacaaatttagtttttaaacgttctttagttaatgtagaattacaagtttcaaagtatgatgatgttagatcaacgatgaaggtagttttaccaaagggatggacattaaagaacgttgtaaaccattttattgcatggatgggttacactaaaggaacttttgtgaaaacagaaaaatcacatgatcaatttaagatatatattaagaataaggtgcgaccgctcgcagtatttaaaatagaagaaacagctgatggaataataactttaattttattgagtggaagtttagtgaaaaaatatacagttaatcaagggaagttagaatttagattaatcaaagagtcggcagtcgtttatatacatctatacgattatatccctcgattattttggccgatttattactttatacaagcaccaatgcaaaaaatgatgattcatggctttgaagttgactgccggattaaagattttcaaagtcgattaaaatcaggagaaaatatgaaatatactaaatgatattgggtgatatggatgcaaatactactagtagaagatgacaatactttgtttcaagaattgaaaaaagaattagaacaatgggattttaatgttgctggtattgaagatttcggcaaagtaatggatacatttgaaagttttaatcctgaaattgttatattggatgttcaattacctaaatatgatgggttttattggtgcagaaaaatgagagaagtttccaacgtaccaatattatttttatcatctcgtgataatccaatggatcaagtgatgagtatggaacttggcgcagatgattatatgcaaaaaccgttctataccaatgtattaattgctaaattacaagcgatttatcgtcgtgtctatgagtttacagctgaagaaaaacgtacattgacttggcaagatgctgtcgttgatctatcaaaagatagtatacaaaaaggtgatcagacgattttcctgtccaaaacagaaatgattatattagaaattcttattaccaaaaaaaatcaaatcgtttcgagagatacaattatcactgcattatgggatgatgaagcatttgttagtgataatacgttaacagtaaatgtgaatcgtttacgaaaaaaattatctgaaattagtatggatagtgcaatcgaaacaaaagtaggaaaaggatatatggctcatgaataatttgaaatgggtagcttattttttgaaatctcgcatgaactggatattttggatattgtttttaaacttccttatgttaggcattagtctaatcgattatgattttccaatagacagtttattttatattgtttctttgaatttaagtttaacaatgatttttcttttattgacatattttaaagaagtaaaattatataagcattttgacaaagataaagaaatagaagaaattaaacataaagatttagcggaaacgccatttcaacgtcatacagttgattatttatatcgtcaaatctcagcgcacaaagaaaaggttgttgagcaacagttgcaattgaacatgcatgaacaaaccattacagaatttgtgcacgacataaaaacacctgtgacagctatgaaattattaattgatcaagaaaaaaatcaagaaagaaaacaagcattactatatgaatggtctcgtataaactcgatgctagatacacagctgtatattactagattagaatctcaacgtaaagatatgtattttgattacgtgtcacttaaacgcatggtcattgatgaaatacaattaacaagacatattagtcaggttaaaggtattggttttgatgttgactttaaagtggatgattatgtttatacagatataaaatggtgtcgtatgattattagacaaattttgtcaaacgcattgaaatatagtgagaattttaatattgaaattgggacagaattaaatgatcaacatgtttcgttatatattaaagactatggcagaggtattagtaaaaaagatatgccgcgaatatttgaacgaggatttacgtcaacggctaacagaaatgaaacgacgtcttcaggtatgggtctatatttagtaaatagtgtaaaggatcaattaggtattcacctgcaagtcacgtcgactgttggtaaggggacaactgtcagattgattttcccattacaaaatgaaattgttgaacgcatgtcggaagtgacaaatttgtcattttaaacatgcgttttgttacttagaattgatacatcaatgcagcttcaacgttataataagatagatgttagtcatatgttaaattgaagatacaagtgccaaagcctaaaggaaatgaagttaagataaattataggagtgttaaagtggcaattttagaagtaaaacaattaacaaaaatatatggaactaaaaaaatggcacaagaagtgttgcgagatatcaatatgtctattgaagaaggcgagtttattgctattatgggtccctctggatctgggaaaacgacattattaaatgttttaagttcaattgattatatttcacaaggttctattacattaaaaggaaaaaaattagaaaagctttcaaacaaggaattatctgatatacgcaagcatgatattggttttatttttcaagagtataatttactgcatacattgactgttaaagaaaacataatgttaccactaacggtacagaagttagataaagaacatatgttaaatcgttatgaaaaagtagcagaagcattaaatatattggatattagtgataaatatccctctgaattgtctggtggacaaaggcaacgaacatcagctgccagagcatttataacattgccttctattatatttgctgacgaaccaacaggtgcactggattctaaaagtactcaagatttattaaaacgattaacaagaatgaatgaagcatttaagtctacaattattatggtaacgcatgatcctgttgcagcaagctatgcaaatcgagtagtgatgctaaaagatggtcaaattttcactgaattataccaaggggatgacgataaacatacctttttcaaagaaataatacgtgtacaaagtgttttaggtggcgttaattatgacctttaacgagataatatttaaaaatttccgtcaaaatttatcacattatgccatctatcttttttcgttaattacgagtgtagtattgtattttagctttgtagcattaaaatacgctcataaactaaacatgacagagtcatatccaattataaaggaaggctcacaagtcggaagctactttctatttttcatcataattgcatttttgttatatgccaatgtgttatttattaaacgacgaagttatgagcttgcattatatcaaacattaggtttatctaaattcaacattatttatatactaatgctcgaacaattactaatatttataattacggcaatattaggtattattattggtatttttggttcgaaactgttattaatgattgtctttacattattaggaattaaagaaaaggttccaattatttttagtttgagggcggtatttgaaacattaatgttaatcggtgtcgcttattttttaacatctgctcaaaattttatattagtgttcaaacaatctatttcacagatgtcaaagaataaccaggttaaagaaacaaatcataataaaattacatttgaagaggttgttttaggcatcttaggtatagtattgattaccacaggatactatctatctttgaacattgttcaatattatgattctatcggtacacttatgtttattttattgtcaactgtgattggggcatacttattttttaaaagctctgtttctctagtttttaaaatggtgaagaagtttagaaaaggtgttataagtgtaaatgatgtcatgttctcatcatctattatgtatcgtattaagaaaaatgctttttcacttacggtcatggcaatcatttcagcgattactgtttcagttctttgctttgctgctataagtagagcgtccttatcaagtgaaataaaatatactgcaccacacgacgttacaattaaagaccaacaaaaagctaatcaattagcaagtgaattaaacaatcaaaaaattcctcatttttataattataaagaagtaattcatacgaaattgtataaagataatttatttgatgtaaaagcgaaagaaccatacaatgtaacaattactagtgataaatacatccctaatactgatttgaaacgtgggcaagctgatttatttgtagcggaaggttctatcaaagatttagtgaaacataagaagcatggtaaggcaattataggaacgaaaaaacatcatgttaatattaagttacgtaaagatattaataaaatctattttatgacagatgttgatttaggtggaccaacgtttgtcttaaatgacaaagactatcaagaaataagaaagtatacaaaggcaaagcatatcgtctctcaatttggattcgatttgaaacataaaaaagatgctttagcattagaaaaagcgaaaaataaagttgataaatctattgaaacaagaagtgaagcgataagctcaatatcaagtttaaccggaatattattatttgtaacatcatttttaggtattacattcttgattgctgtatgttgcattatatacataaagcaaatagatgaaaccgaagatgagttagagaattatagtattttgagaaagcttggatttacacaaaaagatatggcaaggggactaaagtttaaaattatgtttaattttgggttacctttagttattgcactatcacatgcatattttacatcattagcatatatgaaattaatgggtacaacgaatcaaataccggttttcatagtaatgggattatacatttgtatgtatgctgtttttgcagtgacggcttataatcattccaagcgaacaattagacattccatataaaatatacagatggctttcagtagagtagtggattcggattcacgaactatactggaagctttttattataaatgaagagaagttatatttttagcatgtatagttgaatactgggttaaaataccatattaataatgaagtaaaggtatgagtgattatgaaagtgttttgaatgaaatatatttaattggtgatgcttttaattgaaaagattaacaggattcaactttgtaaattgtattaaatgtgagaaaataaaagtatattcattgagagatatatgagtcaatgatcgttttaaacaagataagtgtattttaatatgtaaaagttatgtaataaatattgtatcgttgcaaatttcccaactatatccatttacaatttttagagttgtatagataaaaaattgcctatacaataactttttcaaaacaaatgcctactactatttaaattttatgtaaaagttaagtttcggaattgttaaaaatttgtaaattgaattgtgggattgtaaattttgtgctattttcatataagggcaaatacagtaaattgtttactgtgaggcatttttgaaattaatatcagtacactaaaattatactgacgattgataataacaaatttgtatcattagtttgtaaattcacttgtcttaatttgaaacaaattataactgaatgtgattggtgacaatcgcttaaatggaggattttaaatgtttagtaagaaaaaagataagtttatggttcaattagaagagatggttttcaatctggatcgtgctgctattgaattcggtaaaatggatttcaatacacatttagatttaaaagcatactcagacaacattaaaacttatgagtcacatggtgacgaattagtacatcaagtaattactgatttaaatcaaacatttatcacaccaattgaacgtgaagatattttatcattatgtgatgcaattgatgatgttttagatgcaattgaagaaacggcagctatgtttgaaatgtattcaatcgaatacacagatgaatatatggctgagtttgttgataacattcaaaaagcagttgcagaaatgaaacttgctgtcggcttattagtcgataaaaaattatcacatatgcgtattcattcaattaatattaaagaatttgaaacaaactgtgatggtattttaagacagtcaattaaacatattttcaatagcgaaacagatccaatcactttaattaaaataaaagatatttatgaaagcatggaagaaatcgctgataaatgtcaaatcgtagcaaataattttgaaactattattatgaaaaatagctaaggggagtatatatttatgtcatatataatcatcgtcactatagctgtagttattttctcgctgatatttgactttatcaatggattccatgatacagccaatgcagtagctactgctgtatctactagagcgttaacgcctaaaacggcaattttaatggcagcagtgatgaactttataggtgctttaacatttacgggcgttgcaggcaccattactaaagacattgtcgatccatttaaattggaaaatggattagttgttgtgttagctgcaatacttgcggctattatttggaatttagctacttggttttacggaattccaagttcgtcttcacatgcacttataggttcaattgcgggtgcagcaatcgcatctgaaggctcatttggagtgttacattaccaaggtttcacaaaaattattattgtattaatcgtttcaccgattatcgcattttgtgttggtttcttgatgtattcaatttttaaagttatctttaaaaatgcaaatttaacaagagcgaatcgtaactttagatttttccaaattttcacagcagcgttacaatcattctctcacggtacgaatgatgcgcaaaaatcaatgggtattattacgttggcattgattgtcgctaatgtacagaatgatggcagtgttgaaccacagttatgggtaaaatttgcctgtgcgacagcaatggggcttggtactgcaattggtggctggaaaattatcaaaactgtaggtggtaatattatgaaaatacgtccagcaaatggtgctgcggccgatttatcatctgcattaacaatttttgttgcatcatcgctacatttcccattatcaacaactcacgttgtgtcatcatcaatcttaggtgttggtgcttctaaccgagctaaaggtgtaaaatggagcactgcgcaacgaatgatcattacatgggtgattacattacctatttcagcattgttagcaggtttactattctatatacttaacttatttttctaattgaaaataaaactaaactgaacttcagtatcacaaacatatggtggtattgaagttcagttttttatgtaagtagataacatattttatagaatttacgtagaatgaccaagacaaagcattttaattaggaggctatattataaatgtattccatggaacataatcagttaggtcattaaaatatatgtaagagcaaaataatgatttaatagtttatattcttcaatgaaggaataattaaatagttatcaacttgtttaattaacctaaattgtattgggctttatttaatataaatttgtatatgtagacgaaaaagcgtaaaatactggtataacaaattaaatcattatatagtcaacttagttgcattattttgatttttaatatattatgcatttaatttaatcaaataggtaggttgttaatttttacctaactaccattcatacaaaatataaatatgtatgatagggaagggtgagataattttttgtaccaaaatgaaaatttttttcaaaaataaaaaactagcaatctcacatgatgtgaattgctagtatatatcagtacaatttatttaattaatggatgaatgcatagctagaaacttctgaagctggaattgtacggtagttcatattgtatggaccatatgtgtaattcatttcagaaatcaagatactaccatcaccattgacacgttcaacataagcaacatgaccatatggaccaggtgtgctttgcataattgaaccaactgatggtgtgttgtttacttggtaaccatcattagctgcgttaccagcccaatacttagcgtctgaccaatatgtgctaattggactaccagcttgagcacgacggtcaaatacgtaccatgtacattgaccagcagtgtataaattttggtgattaaaagatgatgcattgccattgctacctgttgtagctgttggtgttgtaccacctgatccaccattaggaatttgtaatgtttggttaggcataattaaataaccacgtaagttattggctgccattaattgatcaactgaaacaccatatctgctagcaatgatatttaatgattcaccagcttgtacagtatgagatgatgctgaaccagcttgtggagaagtgtttgacgtattttgtgcatcacttccacctactgagataacttgaccagggaataccaagttgttatctaattggttattttgtttaatactctctactgaagtgttgtatttttgagcaatactccataatgattcaccagattgtactgtatgttgtgtagaagcttgtgcatcatgatgcgttaaaaatgcagctgcaccagatgttgctgttattgcaaatgctaattttttcaaagggactcctccttaaaattatgttttactacttttaaaaattattaagacaatttatatagtaaattaagttttcgttttatattacgatttccatattatcaaaaataagtagctttgtgtggtttgttattatcttgtaatattattaacattttaggatatcggttcatatttttataaatgctgatttgatagtgtataaaagcgttttagtgattttaactaattataaaaaattatattttgtaacattgtaaaatgtaaaattactatacttgttaaaggttatttcttttgatgaagcaaaatttactgtaaaatttgacgcataaaacgacggtagaaggaggaattattttgtcgcaaaatacaaatcattcatattatcatcaaaaccagcatgctcaatcaataagtaaagtgtggctttattttatgtattattggattatatttggcataggatgctatctaggtcagtttttaccattaagttggcgacaacccttgtcatttggattactgattattattttagcaacacttgtttttgaaagagcgagacggttcggtttaattatttcacatatttacgctgtagtgattggcttattgtcatacgcaacgtttaccacgtatttacaaaatttaggaccagatattttctataaaaatatcgcattagcaatttttgcatttatagcatttggtattattggttatttcttcgttggagatgcatcgagtataggcaaatatttattcgttacattaataacattaattattgcgagtctaattggtatttttcttcaaaatcctattttttacactattattaccgtcgttagtctgttgttatttctactttatactttgtatgattttaatcgtttaaaaagaggtgactattcaccaagagaaatgggatttaatctatttattaatttgttgaatattattaaggatatactttaccttgctaatatgttcagaagataaacagttaaattaataaagaaatttgtataaagttttggaataatcaataatgaatatcaaccttaaactggagcgattgtcataagttagaaacttagactgagattttactgataaagcaataaaaatatattaccttaattgtaaagatattattaatcattgaaatgattaactgctatagttctaaagtaaacaaatcttagaagataaactttaaacaggtgtacttgcctttctaattacacttttattagaaaagtaaagtatagctacgtattaattttaaaatcgaaacattaataggaagaagtatagataatataaacaatttaatgttagtttgagctcatctcaaaagtagaatgtgatttaaataagtgtttatttttaaattgaaaatgaatatataactaacaaaagataatagtaatacgttgtagatgtggtcatttaaaattattttgaaaatactaaaaagtagtgtgttttcaattggatagtttaattaaactgactacatctatttttgtaatatttaaatgattgatatataagtttaaaaattaaccattatatagttttatttatttttgatttggtattcgtattgtgttaaatttacgtttaattaaataagttaaatattatagggaatgataaaagtggtacttaaatatagaaagaggtaaagttatggcaaaatcatgcttgcatatacttactaataatgaatatgcgacaacgcgttgccaagatggcatagtcttattttggccaattgacggggaaatcgaactacaaaaatttcgtaaaagtaaaataattgaagatgatatatatattattaatcatctggatgtatttagtattaagaataataaaaaaacgatcatgttgtatttgagtagcgattggtttgcggaattaggctttactttctttaattaccactatacagcaaagttgattaaatcatcctataatttgaaatgtctactattaaaattgacatatcgataccttgataatcagcctcttaatgacgctgatattagaaaattacaggatattattaaaatcattgcaaaagaagcaagtatggataaaaagattgcacaaaatcaatatcgatatgcgtattatggtgatttgcgtgatgagctcgaatatatttatcaaaatgtaaatcaacgattgacattaaaaagtgtcgctgataaattatttgtctcaaagtcaaatttgtcatcacaattccacttacttatgggcatgggttttaaaaaatatattgatactttgaaaattggtaaatcgattgaaattctacttactactgatagtactattagcaacataagtgaacatttaggttttagtagtagctccacttactctaaaatgtttaaaagttatatggatataacaccgaatgaatatcgtaatttatcaaaatataataaatgtttaatgctaaagccagaaccactagtaggcaaaatggtgcaagaagtaaaagaaatcatattgaattatattgaacattataaaaaccacctaactgatgttatacatattgatgaagacaaatttgaaacacctaaattgtttcaaacggttattcaaataaatacttatacagaaatgaaattagttttcttagaaggaatctttaaaaccttattgaataagaacagtcaagttgtctttttcatcatgccatcgattctaaaaagtaaaaataccatgtccgaagaagaaaaattcacaatcattaaaacaataattgaaagtgatctaaagatagcatttaatataaataatattgaaacaacttattttgttgaagaagcttttatgagtgttttcagacaaatatctccaaacgaattaagtaatcataataattacgaagtgcattttgtttttgatttatcattgatggaaattagaacaatttatcgaatgatattaaaattacataacatcatgttgaatgtgaaattaggattgaacattacctgtttatttgaaaaaccttcagtttttaaatcactagtatcacaaataaagcgacttaaattcgattcgttaataatagataatgcaaatttaagtagcccttatttgatgggggaaagtgatgagttactattgaaaaatattttgcattttaaaaatttaaaacaagtaattaatgaattggatattgaacaagaaaagctgatttttctaaatgttgaaaatcataaactgcttaataataaagaacgagatctaagtaatagtgctccattaatttataagacattaagtgcgctgtatcacaactttgatggctttggattaaacatttttgacaatcatcaagcatttaatgcgatgcatctatatgacaaaaatggatttaaaacaacactaggtcttatattagaaaagtttatcgaatatgtctcgaaaccaaaatacgaaaacagttattattctatttttgatatagagaattattattgtcttgttatttatgattggcgagtgatagagagcgagacaattatgagtaattttgaggatagtcaagtttatataaattttaaaaacaatgttttaaacgataaatatctaattgtaatagaaacattggacgaaaatagtggcaacattaatcatttgatttctaaagaattaagagataaatatgaatggaaccctagtttactatctaaaattgacaactaccttaaaccagcaatagagattaaagagcataattttagtgataattccttgaatattaacgttacttttaatgcgttatacataattaaaataggaaaaaaataacaccttgatatgtattgcaaaatttaatttgcatttgttggtaattttgacaacgtattaaaaacaaatgagaaagacaatggctgaaaaatttaagataataatgacagaagcattgtctttatatatttgggggtgcaacattttgaatactgagaaattagaaacattgcttggcttctataaacaatataaagcattatctgaatatattgataaaaaatataagttgtcgctaaatgatttagcagtcttagatttaacgatgaagcattgcaaagatgaaaaagtacttatgcaatcatttttaaaaactgcaatggatgagctagatttaagtaggacaaaattattagtttctataagaagactaattgaaaaagaaagacttagtaaagttagatcatctaaagatgagcgtaaaatttatatttatttaaataatgatgatatatctaaatttaatgctttatttgaagatgtagaacaatttttaaatatttaattgaaattgagtgtcgaaagcatagaatttgcttatcggcacatttttaatttatacatattttaaaactaagtaacagtttgaagaaatcgtagttcaataatgttaattgtgaaaatgtatataaacataaaaaaatcatgtataatatatgttgttaattaaacagttcgaaagcgagatgacattatgggacgtaaatggaataacattaaagaaaaaaaggcccaaaaagataaaaacacaagtagaatatatgcgaaatttggtaaggagatttatgttgcagcaaaatctggtgaacccaatccagaatctaaccaagctttaaggttggtgcttgaacgcgctaagacatattcagtgccgaatcatattattgaaaaagcaatagataaagctaagggtgctggagacgaaaactttgatcacctaagatatgaaggatttggcccaagcggatcaatgctaattgttgatgcgttaacaaataatgtaaatcgtactgcctctgatgtgcgagctgcttttggtaaaaacggcggtaatatgggtgtatctggatcagttgcttatatgtttgatcatgtggcaacatttggtattgaaggaaagtctgttgacgaaatacttgaaacattaatggaacaagatgtagatgtaaatgatgtgattgacgataatggattgacaatagtctatgctgaaccagatcaatttgcagtcgttcaagatgcgcttcgtgcagcaggtgttgaagaatttaaagttgctgaatttgaaatgttacctcaaacagatattgaactttctgaagcggaccaagtaacatttgaaaaattaatcgatgcattagaagatttagaagatgtacaaaacgtattccataatgtggatttgaaataatgaaatcagcagaacaatggattgatgaattgcaacttgaatcacatcctgaaggtggtttctatagagagacaattcgagaagtattgaaagatggacgcagagcgccgtttagtagtatttattttttacttacagatgacaatatttcgcattttcatcgaattgatgctgatgaagtatggtactatcatgctggcgattctctaacaattcatatgataaatccggatggggaatatacgactgcaacattgggtactgatatccaaaatggagatgtattgcaatatgtagtgcctaaaggaacaatttttgcttcttcaatcgaaatatcaaatacttttagtttagtaggttgtatgtgtcaaccggcatttgagtttaagcagtttgaattgtttaagcaatctgaattaattacgcaatatccgcatcttaaatcagtaatcgaaaaatatgctttaaaataaaagtgatcaatgaagtggtttgaaggttgttaataaacctttgagtcacttcatttttatatgtattcttgattgaatcagaatagatttgatgcttcagctgtttttaatgaaaatagcattaaatgattttgaaaacgataagagtgtgttatttatatttttgaaaaatcacttttatgaagaaatgtgtgtactatctaattaatattgtctattttaagtaaattgaagcgagttgtagtaaaataataataaatattttcatatgattaacaaaaactataaaactgtatcatgacatgacatcatttatgtagttttatataataatgacaaggagttggtgactgtgaaagtaaagtatatagataaacgtcactggcgtcgcctaattgatagggaatacacagaggtaaaagttaataataataggtttaagggtattataggcttagtcacgatgaaaaaggttcgtgatcctttagaggtgacggtagttggacaaaatatcattgtcgcagatgacaattataaatggttgcaaatactacctgaaaagaaacgttatagtataactgtaatgtttgataataaaggcaatccattagaatattattttgatataaatatcaaaaatataacgcaaaaaggtaatgcgcgtacagtagatttatgtttagatgttttagcattaccaagtggtgaatatgagttggtagatgaagatgatttaatgtttgcattagaaagtgagcaaattacaaaaaagcaatttcatgaagcatatatgattgcacatcaaattatggcagagttagaaaatgattttaaaggattccaaaagaaaatcatgtactgctttaataaaattaatgcaaaggctcaaaaaaatcatcaaaagccacaaaataaaactaatattgaaaaaagcaaacaaataaagcctaagcaatataatcaaactaaaaatcaccaacaacaaaagaaaaactaagtaattcaagctgcagccataccaataaaattggtgaaattattcgttagtaatgaactcatgaatgcttgtagccatgaaagttcaataattgaataatttatggggggaaattatgaagattgaagactatcgtttactaataacattagacgaaacgaaaacgttacgtaaagcggctgaaattttatatatatctcaacctgctgttacacaaagactaaaagctattgaaaatgcttttggagtagatatttttatcagaacaaaaaaacaattgattacaacaactgaaggaacaatgattattgagcatgctcgtgacatgttgaaaagagagcgattattttttgacaaaatgcaggcacatattggtgaagtgaatggaacaatatcaatcgggtgttcttctttgattggacaaaccttacttcctgaagttttgagcctatataatgcccaatttcctaatgttgaaatacaagtgcaagttggttcaactgaacaaattaaagcaaatcatagagattatcatgttatgataactcgtggaaataaggtaatgaatttagctaacacacatttatttaatgatgatcattattttatttttccaaaaaatagacgagatgatgttacaaagttaccatttatagagtttcaagctgatccgatttatataaatcaaataaaagaatggtataacgataatttagaacaagattaccatgcaactattacagtggatcaagtagcaacttgcaaagaaatgttgattagtggtgtaggtgttacaatcttgccagaaattatgatgaaaaatatcagcaaagaacaatttgagtttgaaaaagtagaaattgataatgaaccgctgattcgttcgacatttatgagttatgatccgagcatgttgcaattgccacaagttgattcttttgtaaatctcatggcgagctttgttgaacaaccaaaggcgtagttttagactaatttaaggtttgtatttaattttaaactattcggttaaattgaacgtagttggttgctaatgcaccaacagcaaaagagcccctaattaataaattaaaaggggacaaaggaatacagttggttgctaatgcaccaactgcataagagcccctaattaataaattaaaaggggctctaagaagcggggttatggatatgtttgcagcgttattacaaataaagaattataaactctttgttgctaatatgtttctactaggtatgggtattgcggttacggtcccatatcttgttctttttgcaactaaagatttaggtatgacaacaaatcagtatggattacttctagcatctgcagcgattagccagtttacagtaaattcaattattgctagattttcggatacgcatcactttaatagaaaaattattattattctcgcattattaatgggtgcgcttggtttttcaatatacttttttgtagatacaatctggttattcatattactatatgcgattttccaaggattatttgcaccagcaatgccccaactttacgcatctgctagagaatctatcaatgtttcaagctctaaagatagagctcaatttgccaacacagtattacgttcaatgttctcattgggctttttatttggtccatttattggtgcccaattaatcggattaaaaggctatgctggattgtttggtggaacaataagtatcattttatttactttagtacttcaagtgtttttctataaggatttaaacattaaacaccctattagtacgcaacaacatgttgaaaaaattgctcctaatatgtttaaagacaaaacgcttttattaccatttattgcatttattttattacacattggacaatggatgtatacgatgaatatgcctttatttgttactgattatttaaaagaaaatgaacaacatgtcggttatttagctagtttatgtgctggtttagaagtgccatttatgatcattcttggcgttttatcatctagattacagactcgaacattgttgatttatggagcgatttttggtggtttattctacttcagcattggggtatttaaaaacttctatatgatgttagcaggacaggtgtttttagctattttcttagcggttcttttaggaattggtattagttatttccaagatatcttaccagattttccaggatacgcttcaacactattttctaatgcaatggttattggacagttaggcggtaacctattaggtggtgctatgagtcactgggtaggtttggaaaatgtattttttgtatcagcagcatcaatcatgttaggtatgatacttatattctttactaaaaatcaaaaaattacaaaagaggatgtgatatcaacatgacaattattttatggctacttatcatcgctgccttcatgttagcatttgttgggttgattaagccgattattccttctgttttagtattatgggttggctttttaatctatcaatttggctttcataatcagcatttatcatgggtgttttatgtatctatggcattgctaacaatattaattttatgtgccgactttttagctaataaatattttgtgaatcgcttcggtggttctaagtttggagagtatgcagctttaattggtgtggttattggatgttttgttttaccgccatttggaattattattataccttttattttggtattcatagttgaattaatacaaggctattcatttgaaagagcagttaaagtaagtataggttcaatcgtagcatttttaacaagtagtatagctcaagcaatcattatgtttataatgattgtatggttctttatagatgctttattgattaattaataaaaagcttattgcaaaatatgtttttcggtaactgtaatttagtgattttatcattaacagtaccaaattcgcatatgatgtaataagctttttgtttataaaaatgtatgagaatgttttttcgaaatatttctttcaatgcgtaatccaataggcataactataaatgaaaatataataaatacccaattgcttacctgaatatatggtccaaaggcaagtaatgattgtggaataaagaatacatagaaaaatcctacaattagtagaatgattgctaaataggtgaatatccatatccaatttgaattgttaaaacactgcagttgtattgttttaaaactaaaccatataaataaaaagacaataaagaatccaacgactactgaaaacgggaatgaaacaaaatataaattacttccatttttttccatgaaaaatcctaaaaatcctttgagaaaactaacaatcccaattaatagaacgatgtgttgatagatatatttaaaaatatttttaaatgtttcattaggcatcgcttttagttcttttattgcatgtgcttttgggtcgtgattgaaaaaatctaaggctaataaaccatgttgttctgcgcttaataattgtttgagtatacggttaataattaactctgtatcatgagggttgacgcgaaagtcagagcgcatataagtcatataattctcgaagatttctctatcagtattgcttaatcttaatgatttaacattattttcttttgttaattgcgcagtacttttcattgttacttaagcgctcctttaaaaatgtttaattccaaattaaaatggaaatgattttatagtattaataaggtcaatcatatcatattaaacgcataaatataacgattaatattggagaggaaaatgaggacacttaataaagatgaacataattatatcaagcaaatagctaatatacatgagacattattgtcgcaagtagaatccaactataaatgtactaaactgagtattgctcttaggtacgagatgatatgttcaagattagaacatacaaatgataaaatttatatatatgaaaatgaaggtcaattaatagcgtttatttggggacattttagtaatgaaaaaagtatggttaacattgaactgctatatgttgaaccacaatttcgcaaactgggaatagctacgcaactgaagattgcgcttgaaaaatgggcaaaaactatgaatgcaaagcgaataagcaatacaattcataaaaataatttgccaatgatatctttgaataaagatttaggttatcaagtgagtcatgtgaaaatgtataaagatattgattagaattaggattatgttgctaattcatgttaaaattaaaaaagatttaatgacgttaaggagttttatatgaagaaattaatcatcagtattatggcggtcatgctatttttaacaggttgtggtaaaagtcaagagaaagccactctggaaaaggatatcgataatttacaaaaagaaaataaagaattaaaagacaaaaaagaaaagcttcaacaagaaaaagaaaaattagcagataagcaaaaagaccttgaaaaagaagtgaaagatttaaaaccttcaaaagaagataacaaggatgataaaaaagacgaagacaaaaataaagacaaagataaagataaagaggcatcacaagataagcaatcaaaagatcaaactaagtcatcggataaagataatcacaaaaagcctacatcagcagataaagatcaaaaagctaatgacaaacaccaatcataatcgaattgcttacttgttatagatgaaaggtacagcgttttaaaccttattttaagggtatgtattaattaaaatgtggtcatgattgaaacagaatgtaaaaatagacaacataattaataaaggagagaaacggcatgcatgaacaagattttagaattttagagggtcaagatattactttgccagaattaggtagagaattagaaaatattacaggacatacgattgctgattctactggcgaaattaagcgtgtaattgcacatttaccaaactttgagtccgatacagatacttttgttgctacatatcgtttaaaccatcaacaagattttatagatgcaacttttactgcgctgaaatcagatagagcacgtttaaaagaagtgccagttcatgttgaacttataagttatatttctaaatcaaaataaactgctatctaaaacgcaaagttgatcaaaatatcgattttgtgttttttattgagaaattatataggagtgtcaatcgatgatttattgtgaaacagagcgtttaatattaagagactggcatgaagatgatctgttaccttttcaaaaaatgaatgcgaattatgacgtacgtaaatattttccaagtttattgagttatcgtcgttcagaattagatatgagaactatggatgcggttattaaagattatggcattggattatttgctgtagaagataaagagtcccatcaatggataggctttataggtttgaattatattccagaaacaagcgattatccatttaaagaattaccgctttatgaaataggttggcgcttgttgccagaattttggggaaaaggattagcaactgaaggcgcaaaggcaacattgaagttagcagaagaacatcaaatatacgatgtctatagttttacagcagaagcaaataaagcttcacaacgtgtaatggaaaaaattggcatgacagtgtatgatcatttcgaattacccaatctaagtaagtatcatttattaaaaaggcaagtgcgctattacattaatcttcgaaagtgaaaaatttatacataagcgtaacaaacacccctaacattgtttagctgatgataacaatattaggggtgtttgtttattttttaaccttagaatgattaatcgtatgaacgagtacccagaggtttgaaatttaatattgattcaattaatgattccttagtgtcgcataacggtgcaagagcacgatacttaggatcaataaaaccttcctcaatcatatggtcaatcattgtttgtagtggattgaaaaagccattaatattataaatggcaataggcttttcatggatacctatttgagcccaactatacatttcgaaaaattcttctagtgaacctgcgccaccaggagccatgacaaatgcatctgcaagttctgccattttatttttacgttcatgcatagaatcaactaaaattaattcagttaaacgttggcttgtgatttcatgttcatctaacattttaggcatgacgccaatagctttgccgccatgatctaatacaccatcttgaatggcacccataatgccaattgaccctgcaccaaatactaattcataaccttgttcagcaaaatatttacctaaatcgtatgctttttgtacatatgaagggtcatgacctttgcttgcaccacaataaactgcgattcgtttcatgttaatccagctccttaattcgatgaatgacttttaatagtgattgttcaaacactttttgatcttgctttgtaaaaggtgggggacctttgtggcgaccaccttgttttctaatttgtgcattcatatatcgtttatctaatagttgttgaatatttttggaattgtatatcttcccattatgatgcatgacaattaagactttgtcgactaataaacttgcgagtccataatcttgagtgactacgatatcatccttcgttgataattgaacaattttgtaatcaactgcatctggtccatcatcaacatataatgttgatacatgtggaggatataattggttcgaaaaatggctgaagctccgaataattgtcacaaaaatgcctgtctcagttgttaaatctataatagaatcaacaacaggacaagcatctccatcaataataatatgtgtcacaattatgcctctgtattgttttctttattttgttgagaggcgcttttggcaacataatctttatattttttaaatgacttgatgcgtgctttatcagcttcttgttggcgtttttgttcttctttgtgtcgtttttcaatatttttttgtaactttttattcattttagcgatttctttgcgatttttttcagctagtttatcgccttttttctcagttttctcatctaatttattaggtgttaagcctgctttttcttcgtatttttgtgattttttcatatctttaatacgttgtatttcattcttttcgcgggctttttgctcttctttatgacgcttttcgatatttttttgaagtattttattcattttatcagcgtctttacgattttgtttagctaatttttcgccttttttctcaatataggcaggatcatgttctctagcaaactttttaagttcacgtttattttcaaaatcttgttttttatcgccgacatattctttaacatcactcgctgtgttactgattgctgcagatgtttttgaagcaactttacttgtagcatctgtaactttttgtacgtccggatgttgtttgatacgtttacgttcaacaattaacggtaccaatacaattggtaatacattaatcataaatttgatgacttttttcttatccatagatcttgcctccataattactttattaattttacataccctatgatacatcaatataaacgatgatagtagtgaatcactattaagtatttcagatgttttttaaaagaagacaataaaaactgccaatcaagtgattccttaattgacagtctatattttaaaaggaaattaaatacctttaccaatgccaaatccgaagtaaagtatagcaataaagattactaatacaattctgtaaatggcaaatggaattagtttgattttgttaattagatgcaagaatgttttgattgcaattagtccaacagtaaatgcagctaaaaagcctaaaatataaaaaggtatatcagcaatctgaatatcttgataatgttttaataaagataaaccactagctgctaacataattggaacagccataataaatgtaaagtccgatgctgctttatgatttaatttcattaataccccagttgaaattgttgagcctgaacggctgaaaccaggccacatagctactgcttgagaaataccaattacaaatgcttggaaataactgatttgatctactgtttgtgggtttttaactttagctgagtatttatcagcaataatcatatagatagcacctacgaataagccaatcataacagttggcacactaaataaatgttcttcgatgaaatcatcaaatagtaagcctaaaatacctgctggcaccatacccactaatacatgtaataaatttaaacgtcttggctttgaacgtctttgttgatcgttatctccttcaacatgtttgtgtttaccaatatgtaaaatctctaagaagcgttcgcggaacacccatgctgctgcaaagacggatcctaattggatgacgattttaaatgtaaatgctgactgagaacctaaaaattcagatgattttaaccacatatcatcaactaggatcatatgtccagtagaggaaacaggtgcaaattctgttaatccttcgacgacccctaagataataccttttattaattcaatgataaacataatgtacccactttcattactcaatttaatttatttaaatatcaaaattaccatatcatgatagcatattcatttaaagacatgctagttatagttataatactagactaaagatgtatatattcattttcttttacatgtaaaactacaatattttattgagctatttaatttgattttaaggaaaaccttttataataggtttaggtgatataattgtgaaaaaattaacaacaatactgtttcaatataaaatttttccggtactcatgttcttggtcagtactggtctcggcataatcgttataacgcaaaatattttaatagcagattttttagctaaaattataagacatcaatttcaaggtttatggattgtattatttattttattaggtgttttacttttaagagcaactgtgcaatttctaaatcaatggttaggtgatacattagcatttaaagttaagcatatgcttagacagcgggttatttataaaaataatggtcatccaatcggtgaacaaatgactatactcacagaaaacattgatggtctagcacctttttataagagttatttgcctcaagtgttcaaatcaatgatggttccgctcatcataatcattgcaatgtttttcatccatttcaataccgcattaattatgttaataactgcaccatttattcctttgttttatattattttcggtttgaaaacgcgagatgagtcaaaagatcaaatgacttatttgaatcaatttagtcaacggtttttaaatattgctaaaggtttagtgacgttaaagctatttaatcgtacagagcaaacagagaagcatatttacgacgatagtactcagtttagaactttaacaatgcgcattttacgcagtgcttttttatcgggattaatgctcgaatttataagtatgttaggtattggattggttgcattggaagcaacgctaagcttagtagtatttcataatattgattttaaaactgcggcaattgcgattattttagcgcctgaattttataatgcaattaaggacttagggcaagcgttccatactggaaaacaaagtgaaggtgccagtgacgttgtgtttgagtttttagaacaaccgaactataataatgaatttctattaaagtatgaggaaaaccaaaagccatttattcagttaacagacatatcatttcgatatgatgattctgatagattggtattaaatgatttaaatttggaaatatttaaaggtgatcaaattgcacttgtaggtccaagcggggcaggtaaatccactttgacacatcttattgcaggtgtttatcagccaacaataggtactataagtacaaaccagcgtgatttaaatataggaatacttagtcaacagccatatattttcagtgcttctataaaagagaatattacgatgtttaaagatatagaaaataatactattgaagaagtgctagacgaagtaggtttattagacaaagtgcaatctttcacaaaaggcattaacacaataataggtgaaggaggcgaaatgttatctggtggacagatgagacgcatagaactttgccgtcttttagttatgaagccagatctcgttatatttgatgagcctgcaactggtttagatattcaaacagaacacatgattcagaacgttctgtttcaacattttaaagatacaacgatgattgtcattgcacatagagataatacaattcgccatttacaacgacgcttgtatatagaaaatggaagactgattgctgatgatcgcaatatttcagtaaatataacagaaaatggtgatgacttatgaaaacacgactaaaatttcaagtagataaggatttattgttagctatagttgttggtgtttgtggaagtttagttgcgctcgccatgtttttcttaagtggttatatggtgacacaaagtgcacttggtgcgccactatacgctctgatgattttagtcgttacagtaaaattgtttgggtttttaagagctattactcgatacgtagagcgccttatttctcataaagctacatttacaatgctacgtgatattcgggtacagtttttcggtaaattagtaaatgtcattcctaatgtttaccgtaaactgagttctagtgatttaatttcacgtatgattagtcgtgttgaggcattacaaaatatatatttacgtgtttattatccaccagtcgtcatcggtttgacagcgctagttacagtcatagttttggcgttcatttcaatcggccatgcgctattgattatggttagcatgttgttcactttactcattgttccttggttaagctcaaaaaaagcacgtactttaaagaaacatgcagctaatgaacaggcccgatttttaaatcatttttatgattataaagctggtatggatgaactacgtcgatttaatcaaattaatcattatcgagataatttgatggctaaattaaatcattttgataaattacaacttaaagagcaacgctttttaacgatttatgattttatattaaatattattgctatgctttcgatttttggtagtttagttctaggattaattcaaattaatgcaggccaactaaatattatttatatgacgagtatagttttaatggtcttaactttatttgaacaagctgtaccaatgacaaatgtcgcgtattataaagcggatactgaccaagcattgcacgatattaatgaagtgatatctgtaccttctactaatggaaaaaaacgtcttaatgataagtatgatgcaacgaacatttatgaagttaaggatgctagttttaagtattggaatcagcaaacgtatgtgttgtcggatattaattttaatgttaatagaggcgaaaagattgcgattgtgggtccttctggttcaggaaaaagtacattactacaaattatggcagggttatatcaattagatagtggctctgttcgtttcgaaaatatggatatgtttgaaatagatgacaaagataagtttgaatcgttaaatgtcttgctacaatctcaacaattatttgatggtacaatacgtcaaaatttatttaccgatgaaaaagatgaagcggtgcaagcaatatttaagcaattagatttagaacatttggcactagaacgtcaaattgacttagatggtcatacattatctggcggagaaattcagcgtttagcgattacgaggatgttattaaaagatactgcatcaacatggattttagatgaaccaacaactgcattagataaacaaaatagtttaaaagttatggatttaattgaagcacatgcagaaacattaattgttgctacacacgatttaactttattgtcacgttttgagaccatcattgtgatgataaatggtaaaatagttgaaaagggaaactatcaacaattactagctaatcaaggtgctttatggaatatgattcaatataatgcataaaaaaactgcttgataggctaagaaacctttcaagcagttttttaactaacaagcttacgcgtgctaattgtttttctattcttaataaattctaaacattactttaattgtcatgacaaaagttaattatttttcctttgtttcatcaaatgcatgaatgactttacctaataagcgattaagttctttaacttcatcttgcgataaagaagaagctgaagcgactttgtcagatgcattacttaattctggtctaatagtttcacttttgtcagtcaagtgaataaatacttcacgttgatcgacttcggaacgttcacgcttaattaagtctacttgttccattcgttttaataatggtgatactgtaccagtatcgagtgctaattcagttacgactttcttgacgtttacaggagattcatcccataaaattgttaagacaagaaattgtgggtatgttagattgtacttcttaaaaactttgttagagtagtagcgattaacttgtctttgagcattgtacaaactaaagcatagctgttcttttaaattatgttgatcagacattaaagttctcctccagacatactatccgtttttttctcttttcggattggtaatcattaaaaagttgattgtttattaattcacaactttctttgattcaatgccatgctaaaattaaagtatgtttaaagtttagaagatatttttgattaaatcaagcaaaaagataatttaatatatatgttatcatttttaaaaataactgtaatagaaaagagaatataaaatgaaaaataataaagatgaaaaaataagaatatccataattaacggatttttgggtagtggtaaaaccacgttactgacacattatattagtgaattattaaaaaatgatgagaaaattaaaatcatcatgaatgaattcggtacttttgatattgatagcaatagtatttcaaatgaaattgaagtccattcattgattaatggttgtgtttgttgcgatcttaaacaagaacttgtctatgaactaaaagccattgctttaaaaggggacgttaatcatgtcatcatagaagcgacaggcattgcgcatcctttggaattactagttgcatgtcaagatccgcaaatcgttaatttctttgaaaagccgattatttatggtgtattagatgcgactcgatttttagaacgtcatcaatataccgaaaatacagtttcgctgatggaagatcagttgaaactaagtgacatgattattattaataaaattgatcttataactgatgacagtcttgagaaaattgataagcaattaggtatgatttgtgcaagtattccaacttataaaacaacctatggaaaagtttcgttggaagaattggacttaactgttaaagacagagagatatcgtctcatcatcaccatcatcatgggattaaaagtatgacttacacgtttacaggtccgattgatcgtcatttgttttatcaatttataatgaaattaccggaatctgttctacgtttgaaaggttatgtgtcatttagagatcaaccaaatgcaatttatgaatttcaatatgcatatggtttaccagactatggaataattggcatgcaattaccattaacgattgttattattggtgaaactttagatacaaatcacatacgtaatcaattggatatgctacaatttacgtaaatcagaaaatgtgttgtttcaatttaacggaaatagcacattaatttcttaatacttttattgtgaatattttgtgacattgagggatggagtggatgagatatggaacaaataatgattaatcactatgttcatttttctaggcttgtacaaggtttttggcgtgcaaatgaatggaagatgactgcgaaagagttaaattattttataaatgaattagttgaacgtggaattacaacgatggatcatgctgatatttatggagattatcaatgtgaatcactgtttggtaatgctttggatttatcacccgaattaagaaataaaattcaaattgttacgaaatgtggtatcattttgccttctaagcaatttgattttacaaatggacatcgttatgatttgagtagtaagcacatcgtgaaatctgttgaacagtcattaatcaatttgaatgtagattatttagatagtctactcattcatcgtccttcaccattgatggatccagaacaagttgctgatgcattaactaaacttgttaaacaaggtaagttgaagtcattcggggtgtcgaattttaatcattcacaataccaattgttaaatcaatatattatgaaagaaagactacatattagcatcaatcaattagaattatcgccatatcacgttgatagtttacaagatggaacaatggattcaatgtatcaaaaccatgttcaaatcatggcttggagtccttttgcaggcggtaaaattttcgacaaggaagatattaaagcgcaacgtattatgaaagttgttcaatcaatagctgacaaatatggtgtgagtgacacagctgtgatgatagcgtggttagtaaaaataccgcatcgtatcatgccgatacttggaacaagtcagttaaagcgtattgatcaagcaatcgaagggctacaacttaatttagatgatcagtcgtggtttgacatttacaccgctattatcggacaagatattccgtaaacttatttacttttaaatcataaaggagcatatcatgacaaacgaagataaacgtttcgaacaattaagatttgaacgcaaatttatagttattccgtatttaatttatgcagtcattgtattactattaaatattttctattctgatttgaaaataacaatgacattattcggacttttctttgcgtataatgtagtcattttgttcatagcatttgttaaacattataaacgcacattgttactaagtcttatattaacagtgcttagtggcgcggcattctttggaattatttatgtttatggcattaatcatttttaaacattaaaaagagactatctacaataatctcatttgcattttatctaactaagtttaacttttgcttagaaaaatgatgctatgaggatattcagtagatagtttttttatgatctaatatttaaacttagatatcgttttgtaattaaccgagataactcatcacctagcaatattatttacaaaatatttcgataaaattgtgtattttgcataaattaaaaatgtatgttttaaaaaattgttataattaaattaagattaaacaaaggggtgactgttatgtcagaagaaaaacatgtagttgaacatgaacaacaaaagaaagaaaagacaaaaaagcaatacaagccattttggattgtcatgagttttataatacttatagttgtactattactcccggcaccttcaagtctgccgataatggctaaggcagtactagctattttagcttttgcagttattatgtgggtaacggaagctgtatcatatccggtgtcagcaactttaattattggcttaatgatattacttttaggatttagccctgttcaaaatttaggggagaagctaggtaatccgaaaagtggcagtgctattttagctggaagtgaccttctaggaactaatcatgcattatcattagcgtttagtggatttgcaacttcagctgtagctctcgttgcagctgcattatttttggctgctgctatgcaagaaacgaatttgcataaaagactagctcttttagtgttatcaattgttggtaataaaactagaaatatagttattggagcaattatcgtttcaattgtacttgcatttttcgttccttctgcaacagctagagcaggggcagttgtaccaatcttgctgggtatgattgcggcatttaaagtttccaaagatagcaagttagcgtctttattaataattacttcagtacaagctgtgtcaatttggaatattggtatcaaaacggcggcagcacaaaatatcgtagcgattaattttataaaccatcaattaggatttgatgtttcatggggcgagtggttcttatatgcagcgccttggtccatagttatgtccgtagctttatatttcatcatgattaaagtgatgcctccagaaattaatacaatagaaggtggtaaagatttaataaaagaagaattgcataaacttggccccgttagcccacgtgaatggcgtttaattgttatatcgatgttattattactgttttggtcaactgaaaaagtattacatccgattgactctgcatccattactattattgctttaggtgttatgttaatgccgaaaattggtgtcatgacatggaaacatgttgaaaataaaataccatggggaacaattatcgtgtttggtgtaggtatttcactaggtaacgttcttttgaaaacaggtgcagctcaatggttaagtgatcaaacttttggtgttttaggtttaaaacatttacctattatcgcgacaattgcacttatcacgctttttaatatattgattcatttgggctttgcgagtgcaacaagtttatcatcagcgttaatacctgtttttatttcgctaacctctacgttacacttaggagaccagtctataggatttgttttaattcaacaatttgttattagttttggtttcttattacctgttagtgcacctcaaaatatgttggcttatggcactggtacttttacggttaaagatttcttgaaggcaggtataccattgacaattgtagggtatattctagtgatagtttttagcatgacttattggaaatggttaggtttgctttaattaaaaatataaataagaatctaggttattttaaagtgacaaaaagcttaataaaataaaaagataattgaagggtgttttgtttatggcaattgctgtgttattaaatcgaatgtttcgaatggaacacaatccattatttgaatatatttatcaacaaaaagaagacattgatgcatgttattttatcattccggaagaggacatgtcttcagcttctgatttgaaagcacagttttatcgcggtactttgcagcgcttttaccaatcgttgcacgcagaaaagcttacaccttatgttatgtcttatgacgatatcatttcattttgtaaagaaaacaatatctctgaagtagtgactgcgggtgatattatgagttatcatcttgaagaatatgatattttacatcaacgttctttattcaatgaagcacgcattgccgttactttgatacgtgggaatcattactttaaagcgagtaaaacaatgaatcaacaaggggagccatacaatgtttttactagtttctataaaaaatggcgaccttacttgaggcatagagacgtatatcactatgatttaaaatcattcgaaaactttgtcattgcatcacctgatgatttagtgtttgatgacatagcatttggatcctcacaaataattgaacagaataaatggcaacattttttagatcaagatatacagaattacgaaagcggaagagactatttacctgaagtattaacaagtcagctaagtgttgctttagcatatggattattagatattattgaaatttttaatgatttattggcgcgttatgatgaagatgaggcaaactatgaagcatttatacgtgaactcatttttagagaattttattatgtgttaatgacacagtatcctgaaacctcataccaagctttcaaacctaaatatcgacagataaaatggtcgcaaaatgaagcggattttaatgcatggtgcgaagggcaaacaggatttccaatcattgatgcagcaataatggaattgacacaaactggttttatgcataatcgaatgagaatggttgtgtcgcaatttttaaccaaagatttatttatagattggacatggggagaaaaattctttagaaagcaccttattgactatgatgcagcatcaaatattcatggatggcaatggtctgcttctacaggtacggatgcagtgccgtattttagaatgtttaatccaataagacagagtgaacgctttgatgctaaagctttgtatatcaaaacatatcttccgatttttaatcaaattgatgcaaaatatttgcatgatacacaacgcaatgagtccaacctttttgaacaggggattgaattaggtagtcattatccaagacaaatggtagatcatcaagaaaaacgtacacaagttttagctacatttaaagcgctagactaattcggctcaattgatagatctggcatgagtaaaatctggagcagaatataaagttcttaagcaatataaataagccaatttctattattgatgtgatagaaattggctttcctcaaatatataagttgtatttagttttcttattaatttgatgttatcttagtatgtccgtaaataaagtgaggtatagtacgacatactctaaaaacgtagcgagataaatatatttcaatctaacttttatgttttgaggcacttgccatttaggatattgtcgttcgtaatacgacacttgttgtataaatacacctagtccaaatggcagcatcatgagtaagatacttcttaaataacttaaaccaatatcatgccatatgtgtccaataatcaattgaaagacaatgatagatactattaaaacgattatatttattgtcacttgttcaaacgcactccttttccaaataatagaattgctgcttgcatgacaaccataaaacatacaaacatagcagttttaagcgttagactttctagaatgtgatttagaacatgtaagggctcattaaagaaataaacggaatgtaagcgtaagaaacgaccaatataaattccgaatccatttaaaaacattagcacgacaacaattaatctattaagccaacggtgagaagtcaatgttagtatttcaaaatagattaaaatcatcacataaaccgctaagaagacaccaagcagtaaataggtaaagtatttccactcacttaaatttagtcctgcgtaaaagttgaattgaaattggttcaaatggattaaatcagttaccatataaaatgtatttggtaaaagtaacacaaatataaaactatatatgataaagagtggccattcatactttttattcggtttgaataatcgtaataatagactaagctcaaaaggtatatatgctaaaaacaaatttaaagtcataaattgaaaaattttagtctcaaaaagggagacgataaataaaattaaaaagtaaattctagcgatgtatcgagattgcatcaataataaacactactttctaatgaaaaagttattcattcaaatgtgatagttataaacgcattcaattcctaattaaaaatttaatttaactcgttgaagtatattaataaacgagaatgcatttatgattaagcacttatgataacttgtaataaaatttgattcaactaaaaagtaaagtgctattgaggatcaagtaaatttaaaccgactgcatctttgaatgaacgttgaatgtccaaatcagttacagtaagaatgatttcagcagttgcagaaacaattgctttagcgagatgtccgctaaaagtttcatatgattgagtaccgaaagtagcatgcaaatgtgcaaaatgaccattgtctagacgagaaatattacctaataagctcgtcaattccagtggctcagtaatatgtttttcttcgtattgtttcgttgttaaattgaaaaattttaatacaacgtcatcacatgcaccaatgccgctgacagatgtaaatgttaagtcttggtcatctgcaaaggttgttatacattcaacgatatcttctcctttttccaacactagtagtatagtatgattacttttttgcaatttcatatgatcaatcccctttattttaatatgtcattaattatacaattaaatggaaaatagtgataattacaaagaaaaaatattgtcaaatgtagcaatgttgtaatacaatatagaaactttttacgaatatttagcatgaattgcaatctgtcgtggaaaagaagaataacagctttaagcatgacatggagaaaaaagaggtgagcatatgaataaacagatttttgtcttatattttaatattttcttgatttttttaggtatcggtttagtaataccagtcttgcctgtttatttaaaagatttgggattaactggtagtgatttaggattactagttgctgcttttgcgttatctcaaatgattatatcgccgtttggtggtacgctagctgacaaattagggaagaaattaattatatgtataggattaattttgttttcagtgtcagaatttatgtttgcagttggccacaatttttcggtattgatgttatcgagagtgattggtggtatgagtgctggtatggtaatgcctggtgtgacaggtttaatagctgacatttcaccaagccatcaaaaagcaaaaaactttggctacatgtcagcgattatcaattctggattcattttaggaccagggattggtggatttatggcagaagtttcacatcgtatgccattttactttgcaggagcattaggtattctagcatttataatgtcaattgtattgattcacgatccgaaaaagtctacgacaagtggtttccaaaagttagagccacaattgctaacgaaaattaactggaaagtgtttattacaccagttattttaacacttgtattatcgtttggtttatctgcatttgaaacattgtattcactatacacagctgacaaggtaaattattcacctaaagatatttcgattgctattacgggtggcggtatatttggggcacttttccaaatctatttcttcgataaatttatgaagtatttctcagagttaacatttatagcttggtcattattatattcagttgttgtcttaatattattagtttttgctaatgactattggtcaataatgttaatcagttttgttgtcttcataggttttgatatgatacgaccagccattacaaattatttttctaatattgctggagaaaggcaaggctttgcaggcggattgaactcgacattcactagtatgggtaatttcataggtcctttaatcgcaggtgcgttatttgatgtacacattgaagcaccaatttatatggctataggtgtttcattagcaggtgttgttattgttttaattgaaaagcaacatagagcaaaattgaaagaacaaaatatgtagcataagtattttggtgtatattgatataaagtaaagcgtaatattatgaatgattagcatcgtttttcttatgaattttattaagaaaattcgatgctttacatttaaaaagattcgattgactaaatgttttactctttatatttaaatgttatatgtaacaaaaaatgattttgagtaataaacatgttacaaatattacattctttttaaattgcaatccacatacctaattcattaacgttaatgtgttaagatgataaaaaatgagtaaggaaatgtgggtaaggggatgacagtaaaaaatttatttttaggctttgttgctgtaatattaaccgtttgtttaattggtttattaatattagcaacaaatgaagatgcgcttgctaaggtacataaaacaattaatacgcttaacgcgataaatgtatcaactgaagatacttataaaaagaaaatggatattctcaatattcatactgctaaagcatctgaagtgaatgaaaatgtgaaaaagcaaaatcattttaaacatcgtgtgaatgcaaataaatcaaattcttttaacgaacaagagtgccaagttattgctgatcgttatgcagataagcatatcaatgataattatggtttagaaagaatttctaagacaaatcatggatataattatgtgtattccaatgataattcaactagtaagcaacatgtaagtatttcaaatcaaggcataataacgaaataatagatggaacagtgtattctaattggatatactgtttttattttgcaataatttaatttaaaaaggtgaattcaacttataaaatgatgtaaatgttatgtcaaaatcaaccaatccgtaatgtattttaaaatgttaatatagttctgaagaagtataaatgaggtgttgaaatggctaaaaataagaaaacgaacgcgatgcgtatgcttgatcgtgcaaaaattaaatacgaagttcatagctttgaggtaccagaagaacatttatctggtcaagaagtcgcagaactcatacaagcaaatgttaaaacagtatttaaaacgcttgttctagaaaatacaaaacatgaacattttgtatttgttatcccagtaagtgaaactttagatatgaaaaaggcagctgctttggttggagagaagaaattgcagcttatgcctttagataatttgaaaaatgtaacgggatacattcgtggtgggtgttcgcctgttggtatgaaaacattgtttccaacagtcgttgacaaatcgtgtgaaaattatagtcatatcagtgtgagtggtgggcttcgaacaatgcaaatcacaatagctgttgaggatttgattacaataactaaaggcaaaattggagcagttatccatgaatgattaataacaacaaaaagtatggggcaagattaggagtgtgacagagatgaaatttttataaaattcatttctgccacactcctttttgattgaattagcattttacgatcataaacagtcattataattgagtatttgaacataaaaatgtaattttatcgtaacaatttgagtgtttgtgattgtttttggtaatttatgattgaaaagtgaaagcgtactcattataatacaaagtgagatggggtgatgatgataattactgaaaaaagacacgagttaatattagaagaactttcgcacaaagattttttgactttacaagaattaatagatcgaactggttgcagtgcttcaacaatacgaagagatttatctaaactacaacaattagggaaattgcaacgtgtgcatggtggtgcaatgttaaaagaaaatcgtatggttgaggcgaatttaactgaaaaattagcaacgaatcttgatgaaaagaaaatgattgctaaaatagcagctaatcaaatcaacgataatgaatgcttatttatcgatgctggttcatctacattggagctaattaaatatattcaagcgaaagatatcattgtggtaaccaatggtttaacacatgtagaagctttacttaaaaaaggtattaaaacaattatgctaggtggtcaagttaaagaaaatacacttgctacgattggttctagtgctatggagatattaagacgatattgtttcgataaagcttttatcgggatgaatggattagatattgaacttggattaactactcccgatgagcaagaggcattagttaaacaaacagcaatgtcattagccaatcaatcatttgtacttatagatcattctaagtttaataaagtatattttgctcgtgtacctttgctagaaagtacgacaatcatcacatctgaaaaagcattaaatcaagaatcgttaaaagaataccaacaaaagtatcactttataggagggactttatgatttatacagtgactttcaatccttcaattgactatgtcatttttacgaatgattttaaaattgatggtttgaacagagcaacagcaacatataaattcgctggggggaaaggtattaatgtctcgcgcgtcttaaagacattggatgttgagtcaactgccttgggatttgcaggtggatttcctgggaaattcattatagatacattaaataacagtgcaattcaatcgaattttattgaagttgatgaagatacacgtattaatgtgaaattaaaaacaggacaagaaacagaaatcaatgcaccgggtcctcatataacgtcaacacaatttgaacaactgttacaacaaattaaaaatacaacaagcgaagatatagttattgttgctggaagtgtaccaagtagtattccaagcgatgcgtatgcgcaaattgcacaaattacagcacagacaggtgctaaattagtagtcgacgctgaaaaagaattggctgaaagcgttttaccatatcatccactatttattaaacctaataaagatgaattagaagtgatgtttaatacaacagtgaactcagacacagatgttattaaatatggtcgtttgttagttgataaaggtgcgcaatctgttattgtctcgcttggcggtgatggtgctatttatattgataaagaaatcagtattaaagcagttaatccacaagggaaagtggttaatacagttggctctggtgatagtacagttgcaggcatggtggctggaattgcttcaggtttaacgattgaaaaagcattccaacaagcagtcgcatgcggtactgccacggcatttgatgaggacttagcaacacgggacgctatagaaaaaataaaatcacaagttacgattagcgtacttgatggggagtgaaaataatgagagtaacagagttattaacaaaagatacaatagcaatggatttaatggcaaatgacaaaaatggtgttattgatgagttagtaaatcaattagacaaagcaggtaaattaagtgatgtcgcgtcatttaaggaagcgattcacaatcgagaatcacaaagtacaactggtatcggcgaaggtattgccattccacatgccaaagtggccgcagttaagtcaccagctattgcgtttggtaaatctaaagcaggcgtagattatcaaagtttggatatgcaaccagcacacttattctttatgattgcagcgccagaaggtggcgcccaaacacatctagatgctttagctaagttgtctggtattttaatggatgaaaatgtacgtgagaaattattacatgcttcatcacctgaagaagtactagcgatcatagatgaggctgatgatgaagtgacaaaagaagaagaggcagaagctgaagcacaacaagttgcaactgcagaacaatcatctaaacaatctaatgagccatatgtgttagcagtaactgcttgtccaacaggtattgcacacacatatatggcacgtgatgcattgaaaaagcaagcggataaaatgggtattaaaattaaagtagaaacgaatggttcaagcggcattaaaaaccatttaactgaacaagatattgaaaatgcaacaggtatcattgttgctgctgatgttcatgttgagacggatcgcttcgatggtaaaaatgtcgtagaagtaccagtagcagatggtattaaacgcccagaagaattaattaataaagcattagatacaagtcgtaaaccttttgttgcccgtgatggtcaaagaaaaggtaactcaaatgacagtcaagaaaaattaagcccaggtaaagcattctataaacacttaatgaacggtgtttctaacatgttgccacttgtaatatctggtggtattttaatggcaattgtatttttatttggagcaaattcatttaatccaaaaagctcagagtacaatgcgtttgcagagcagctttggaacattggtagtaaaagtgcattcgcgttaatcattccaattttatctggattcattgcacgtagtattgcggataaacctggtttcgcttcaggtcttgtaggtggtatgttagcaatttcaggtggttcaggatttattggtggtattattgcaggtttcttagcaggttacttaacacaaggtgttaaagccatgacacgtaagttaccacaagcattagagggattaaagccaacattaatttatccactattaacagtgacggctacaggcttattgatgatttatgcctttaatccaccagcatcttggttaaatcatttgttattagatggattaaacaatttatcaggttctaatattgtattattaggtttagttattggcgctatgatggcgattgatatgggcggtccattcaacaaagcggcatatgtttttgcaacaggtgcgttgattgaaggtaatgcagcaccaattacagctgcaatgattggtggtatgattccaccgttagcaattgcgacagcgatgttaatttttagacgtaaatttacaaaagaacaacgtggttcaattatccctaactatgtgatgggtatgtcatttattacagaaggtgcgattccatttgcagctgccgatccattacgtgttattccttcaatgatgattggttcaggtataggtggcgcaattgctttaggcttaggttcacgaattactgcgccacatggtggtattattgtaattgttggtactgatggtgcacacttacttcaaactcttattgcacttctagttggcacattagtttcagcattaatttacggtttaatcaaaccaaagttaactgaaacagaaatcgaagcttcaaaatcaatggacgagtagttttaatgatgtaaaatgattgttagcaaagagcttcatattaagttgtatgttcaatgaatatatgttagttttatatatcgtgttaacggtagcttatacaaagctgtaaaaacactttctattaattcagtttttatgaattgatatgaaagtgtttttatttttagataaatgaatgaagaaatagacaccacaaatgtatagacttttttaatattttgcaaaaagttatgccaaacgaagcagatatagtaaaatatgagtgtcttaaagtgaaaatttataaataaagaagggtttatacgtgtcagaattaattatatataacggcaaagtttatactgaagatggcaaaatcgataatggttacattcatgtgaaagatggacagattgttgcaattggagaagtggatgataaagcagcaattgataatgatacgacaaataaaattcaagtgattgatgctaaaggtcatcatgtattaccaggttttattgatatacatattcatggtggttatggtcaagatgcaatggatgggtcatacgatggcttaaaatatctatccgaaaatttgttgtctgaagggacgacatcatacttggccactacaatgacgcaatcgactgataaaatagataatgcacttacaaatattgctaaatatgaagcggagcaagatgttcacaatgcagcggaaattgtaggtatacatttagaaggaccatttatatctgaaaataaagttggtgctcaacatccgcaatacgttgtacgcccatttatcgataaaattaaacattttcaagagactgctaacggattaataaagattatgacgtttgcacctgaaattgaaggtgcaaaagaagcgcttgaaacgtataaagatgacattattttttcaattggtcatacagtagcaacatacgaagaagcagttgaagctgttgagcgaggagctaaacatgtcacgcatttatataatgcagcgacgccattccaacatagagaaccaggtgtttttggagcagcatggttgaatgatgctctacataccgaaatgattgttgatggcactcattctcatccggcatcggttgcaattgcttaccgtatgaaaggtaatgaacgtttttatttaattaccgatgcaatgcgtgcaaaaggtatgcctgaaggagaatatgatttgggtggacaaaaagtaactgttcaatcgcaacaagcacgtcttgcaaatggtgcgcttgctggtagtattttaaaaatgaatcatgggttacgtaacttaatatcatttacaggtgatacattagatcatttatggcgagtaacaagtttaaatcaagccattgcattaggtatcgatgatagaaaaggtagtattaaagtaaataaggatgcagatcttgttattctagatgatgatatgaatgtaaaatctacaataaaacaaggcaaggttcacacatttagctaataaataatcataattaaatgtatgcaatagatttaatctgttaacataagcactttatattatgataaaatagaagcaataacatttttttctgggggtgtctaaatgggaaggcgataacatgtagttgtaatttaagtcatagtgataaatttgaatgcgtgttacccatgagtgacacatataacatggaggtgaatccctagaaatagggaattaattggaaacttcgaccataattagtttgattatatttattctattaattgcattaaccactgtatttgttggttcagaatttgcattagtaaaaattagagcaacaagaattgaacagctagcagatgaaggaaataaacctgctaaaatagtaaaaaagatgattgctaatctagattattatctttctgcttgtcagttaggtataacagtaacatctttagggttaggttggcttggtgaaccaacgtttgaaaagctattacacccaatatttgaagcaatcaatttaccaactgcattaacgacgacgatttcgtttgcagtgtcatttataatcgttacgtatttgcatgtagtacttggtgaattagcgcctaaatctatagctattcaacatactgaaaagcttgctttagtatatgcaagaccattgttctatttcggtaacattatgaaaccattgatttggctgatgaatggttctgcacgtgttattattagaatgtttggtgtaaatcctgatgcccaaactgatgcaatgtcagaagaagaaatcaaaattattattaacaatagttataatggtggagaaatcaaccaaactgaattggcatatatgcaaaatatcttttcattcgatgaaagacatgcaaaagatataatggtacctagaactcaaatgattacactaaatgaaccttttaatgtagacgaattactagaaacaataaaagaacatcaatttacgcgttatccaattactgatgatggtgataaagaccacattaaaggatttattaacgtcaaagaatttttaactgaatacgcttctggaaaaacgattaaaatagcaaactatatacatgagttgccaatgatttcagagacaacacgtatcagtgatgcattaattagaatgcaacgtgaacatgtacatatgagtcttattatagatgaatatggtggaacggcaggtattttaacgatggaagatattttagaagaaatcgttggagaaattcgtgatgaatttgatgatgatgaagtgaatgatatcgttaaaattgataataagacattccaagtaaatggcagagtactattggatgatttaactgaagagttcggtatagaatttgatgactctgaggatattgatacgataggtggatggttacaatctcgtaataccaatttacaaaaagatgattacgtggatacaacttatgatcgctgggttgtttcagaaatcgataaccaccaaattatttgggtgatattaaactatgaatttaatgaagcgagacctactatcggacagtctgatgaagatgaaaaatcagaatagatattaatatataaaccaactaagaatgatttaattcatttttggttggttatttttttgactaaaattaatgaaaagtgaaaatagtattggaactcaatatctttaatgatttaatgaataatttttattgaaagcgataattcgtattaattgagtttgttgaaaaatttagggtaatgtaaagatataaaagatacatagattggagagatataaagatgttgaatgagatacaaatattaaataatggatacccgatgccttcagttgggttaggtgtttataaaatctctgacgaagatatgactaaagttgtaaatgctgcaattgacgcaggctatagagcgtttgatacagcatacttttatgataatgaggcttcactaggacgagcattaaaggataatggcgtcgatagagaagatttgtttataacaacgaagttatggaatgactatcaaggttatgagaaaacattcgaatatttcaacaaatcgattgaaaatttacaaactgattatcttgatttatttctaatacattggccttgtgaagcagatggtctatttttagaaacatataaagctatggaagaactttacgagcaaggtaaggtaaaagcaataggtgtatgtaattttaatgttcatcatctagaaaaattaatggctcaatcaagtatcaaaccaatggtgaatcaaattgaggtacatccatattttaaccaacaagaattacaagaattttgtgatcgtcacgatattaaagtgactgcatggatgcctttgatgagaaatagaggactactagacgaccctgtcattgttaaaattgctgaaaaatatcataaaacaccagcacaagttgtattacgttggcatttagcacacaatagaattattattccaaaatctcagacacctaaacgcattcaagaaaatatagatattttagattttaatttagaattaacagaagtagctgaaattgatgctttaaatagaaatgcaagacaaggtaaaaatccagatgatgtgaaaattggggatttaaaataactggatgttaaattttacgtttatgaatgccttttaatgtgtacattaaaataaatgagttggtttttactatttgataaaacaatactcaggtacattcaaaatcttttaaataaaaaggatggacatagatgaaaattagagtcgtcattccttgttttaatgaaggggaagtcattacacaaacacatcaacaattaactgaaatactttcacaagatagtagtgtgaaaggctatgattataatatgcttttcatagatgatggtagtacggataccactatagatgaaatgcaacatcttgccacaatagataggcatgtcagctttatttcttttagtagaaattttggaaaagaagcagctatgattgcaggttaccagcatagtactgaatttgatgcagtcatcatgatagattgtgatttgcaacatccacctgaatatattccgaaaatggttgaaggttttatggaaggctatgatcaagtgattgcaaagcgtgatagaagtggtgaaaattttagtcgcaaaacattaagccatttgtattataagttagttaattgctttgtagaagaagtacaatttgatgatggtgttggtgattttagacttttaagccaaagagctgttaaatccattgcatcacttgaagaatataatcgattttcaaaagggttatttgaatggataggctataatactaaagtgtttacgtatcaaaatgttgagagacaaaaaggggaatctaagtggtcctttaaaaagttatttaattatggtattgatggattgatttcctttaatagtaaacctttgagaatgatgatttatcttggcttgtttatcttttcaataagcgtgttatatattatctatttattcatcaatattatgatatctggtgttaatattccgggatatttttcaacgattgcagctattttattattaggcggcatacagttaatttcaattggtgttgtaggtgaatatattggcaggatatattatgaagttaaggcacgtcctaaatatattattcaagctacaaatctttcaagtcttgaaaatgatgagaaggatacccataaagtttattctaaataaacaaaaaaagaagccctcattaatgggagcttctttttagtctttgcattttattttataaataaatcggattatgacgtaatgtctaatttgtgtaatgttacagtcatcgtagttcctacatctatatcactgcttacactgatttttgcgttattttgttgcgcgagttcattagctatatataagcctaatccagaaccacccgtttttgtattacgagagttttctactctgaatgtacgttcgaatatacgttcttgtagttctggtataatgccaataccttcatcgctaatagcaatgtcgatagtatcttgatcttcgttttcactaatattaatatcaatgcgactaccaacatttgaaaattttagcgcattatcaagtaagtttgttaaaatacgctcaagtggcgttcgatattgataaaatgcatcaatttcgttacagaaattcacttctaatgtgcggttttcatgtttgatacgttgctcatatggttgcaatattgatacaagtaattggtctagttgtattaattctgggggatatgttttacctgtatttaaagtgataatatgagtcatatcatcaaataatgttgataatctgtttgcttgtttaattaatatgtcgtatgactctttaatctcatgatccttagtgattataccatcacgtagtccttcagaatatgaaataatgcttgctaaaggtgtttttaaatcatgggctaagttttgaatcagttctgttttttcttgttgttcggatttaatttgattcatttgttgcgtaatttcagaagccattttattaaaagattgatttaattcataaatttcttttggtgaattaaacgttttatcattgcttgcgtaatttccgttagcaaattgcttagtttttatattaaactgcttaattttttgtataagtggattaataaaaatactacatattaataaggttaaacagcttgtaattattgtcgttaaggtcaaagttagtgtcatatggccgttaaaccacattaaaatatatgcaattgctaaaatagttgaagttaatagtatactcgatacgacgccaataatgatttgacttctaattgataacaccattatcggctcctttcaaatttatatcctaatccccatacagttgtgatggtatatgttgtaaagctctctttttctaatttttctctaatacggtgtatatggacattcacggtattagcatcttcgtaatagtcatatccccaaactttttcaagtaattctgatttagaaataacttcattttctctagaagctaaataccacaataactcaaattccttaatacgcatagggacttcgtgaccatttacagtcacaactttacttaagttaataagtgttaattcatcaaacgacagttgttcaactggttgatgatggtatttcttcattcttgtaagtaaattattaatacgtaaaacgagttcccttggactaaatggttttttgacatagtcatctgcacctaaagttaaggcgtaaatggtatcatgttcttgtgttttggcagttaaatagataaaggggatatctaatttttgccttttcatttctttgacaatgtcgtaaccattaacttctggcatcatgatatcaagtaccatgatatcaatatcatttgatagtaaagaaattgcttctttaccgctagttgtcgttgttactttgtaaccttcatattcaaaataggtttgacaaatgtctacaatgtcttgttcatcatccacgatcagtaagtgggtcatctattttttcacctctgttcttacgacctctaaagtaattaatgatttctttaagtgaaatctgttttaacaatgagtgactcattagtaaaaggataaagaaagttaattgaagaggatacgtaaatatcatatctgctaagatataatttatcataacaaaggctccaaagaaactagcagcatatgcaaaaactccaaaaattaaacctaatccaattgcaatctctccgagtgggacaacaatatcaaataatgacgtcgtatgtgcaactatatttgcgaaaaaccacttataccactctggtgaatcagtattgttagcgatgactggtactaaacctttcagcgtaaatccgcccgttaatttttcgtagccttgcattaacataacaatacctgaacccacacgaatgataaatgtaacgagtagcaataatttattcatgatgttcacattctttctatttattgtgtgtaatttatataaacataagattaagcaacataatgcgatttgtagtgttatgtgaacaggaagtgtttgagctcatgggttgcttaagctaaacaaacctcaagctctaaaaaaatttacttatgtgctctgcaatcttatgggatttaatagttgtatatatattgaaaaaaggaaagtatgatttctacaagctaggggggctgtgaaatcatacgctttccattgagtaatgagtgtaatgtatattttaaaaatttgtaatgtatagtaatagtatgttgtaaataaaagtttaactcagaaattgattattttaatttagcgccgccgaagatgacgtgagcttttttacaatagattgttacttcatcatatttgcttaaatctacatttttaagatcaaatgtttgtttttctttatcgtagtcaaccattgcgatttctttaccgtttttaatgtcgccattttttgttaggtagacgtataaatctggaccttttgatgatttgtagttagtaagcattaatttaccatttttaatctcagctttaccttcaacagtttcaccgtttttagaactgaatgtacctgttaggtgttttgttttatcagttttaacattgctatcttctgactttgttttttgttcagttttgttaccttgatcttgtgaattagaattaccacaagcacctaaagctaatgttgtgataacagcaccagctgctaaaaaatattttgtattcatgctaactcctcatttcttcaatttgataagttaagtttaaaatgaaggcaaataatatgccattaactaattcttaacttcgtttaaatatcgcttaactaatattgaagaaagaataatttgaaaatgaaaataattgtctgatttaaataaataggggtcaaaataagaggagggcgtttttttaagtaaggaaatatttatctgaactagataacactataaaacacttctgatattttgaactaagaatatcagaagtgtttaatagttttggtattaaaatttataaaccttttgccacaataaaaacaacaagaaaataagatagacgattaaatacaagtaccaatatggtgttaaaaccatcataacgataaatgaaatgttaataatgataagtcctttaatcattagtttctttattttgttattattttcagcagtttcatctaagctattaaatgttgaaataaacaacataataccaccaatgatgaaaatggcaggggctaaaaatggaatagacatatatattgattgtgtacttgaaaagtcggtaacacgttgcgttaaactgacaacaatcgttaatatgatagcaataaatttttggtctgtaatgtatacaggttttaattttttatcaatgtaaaactgtagtatcgtccaaatgataaacatcgttatagtacacagagtaataaagttatatttatcaattatgaatgtatttataaaggcgtttatcgtaatagataacaacattgcacttaatgataaatgttgcatttgatgcctatataaattgaatccagttataagtacgacgatagcaatattaattaatatatatacaatcatgatggactcctgttcgttatacttcaatcaactattatatcaattaatatattgttattcattagatatgacttgcaaaaagtaaaataagttatcctttatacaccttttttattgctccaaagtaatgtatgaagttgtggtaacacataaacgtgattcatatcattactttgcataactaaatccaccaactgctcgtagcgttctaacaacttttcggtatgattatctacgctgtctgataaatatgggttaccaacttgtaaatagaagggaatatctggataacggtggtgtatcattttggcaaaatcataatctttatcgtcgaatacaactacttttaagtttaatgatgaaggtacgcattgtgtaatcacttcatctaacttttttaaatcaggtgtcatagttgaacttggtggttttggactaatcgttaaatcatcaatttgtgtcatccaaggttggaatttactgccttgtgtctccagtgcgctgaaaatacctttatcttgaaataagtcaactaactcttggatacctttaattaatgctgggttaccaccagaaattgtaacgtggttaaataaatcgccaccaattcgttttaattcatcataaatttcttcagcggtcatgagttttatatcgcctttagcactaccatcccaagtaaatgcagaatcacaccagctacagcgataatcacatccagctgttctcacaaacatcgtttttctaccgattactcgaccttcaccctgaatggttggaccgaatatttcgagtacaggaattttagccattagttacacctgttcctttggtctaaatacgacataacttgttggtgtttctcttacaaatacttgaatacattttggttggtgttcgagcgatgccaaattttctttaacaatttgataaattgtttccgctacgatttcagttgaagggattttgtttttaaaagcaggtaagttatttaacagttgatggtcaaatttaccgtgtatcatctttttcaaatggctaaagttcactaagaagccagtgtcatctagtttatcaccgacaattgttaaattaacaaagtaagtatgaccatggacattttgacaaatacctgcttcttcacatggaatgtgatgtgcagccgaaaaattaaaatctttatttaattcgaattgatatggatgcgttgtactaggatagatttgttgtaacattttaaagcgctcctttactttcaagatattgatttagtccacgttgacgtaaatgacaagctggacattcaccacagccatccccaatgataccgttatagcatgttaatgtttttgtacgaatataatctaaaacttcgagttcatcacttaatttccacgtttctgctttgtttaaccacattaaaggagtatgaatgacaaaatctttgtccatagctaggcttaatgttacgttcattgattttataaaactatcgcgacagtctgggtagcctgaaaagtctgtttcacatacgcctgtaataatatgcttagccccaatttgataagctagagcgcctgcaaacgacaagaaaagtaaatttctagctggaacaaatgtattaggtataccatcttcattattagtaatttccatatcatgttgtgttaatgcgtttggagtaagttgtgataataatgacatatctaaaacgtgatgtttcattccttgatcttgtgcaatttgttttgcgacttcaatttcagtatcatgtctttggccataattaaacgttacgagttcaacttctttgaaatgtttttttgcataaaagagacatgttgtactgtcttgaccaccactaaagacaacgatggctttttcattatttaatacactttccattttgtaattgctcctatcattaataatattaataaagaggttaatggcattgataagcccgtttttaatttataaaataaaaaaagcctatctccataaaagatagacgaaagaaatgggttgctcctataatatatattaaaggtttaccaacgaatgtttgaaatttcaatgtctagttttttatagagggtttcagctaggaacctctgatattcatttatgtacgatgaatagaatataccatatattagttaaaatcaaggtcaggataatgacaatgcttttaaagttttagctacatccaatacatattataaaaataaaacacatttagaacggagtatacaatgattctagtcatagataataatgattcatttacatataatttaatagactatattaagactcaaacgaaactaacagttcaagttgttggtattgataatctgctgatagaagacgtcattaatatgaagccaaaagcaattgttatttcgcctgggccgggtaatccggatgattatcctatcttgaatgaagtgttagaacaattttatcagcgtgtacctatactaggtgtatgtttaggatttcaatgtatcgtgtcttattttggtggaaatatcattcacggctatcatcctgtacacggacatactacacagttacgccataccaatgaaggtatttttcaaggactgcctcaaaatttcaatgtaatgcgttatcattcattaattgctgacggagcgacttttccaaattgcttaaagattacagcaaaaaacgatgaagcgattattatggcatttgagcatattagatttccggtttttggtgtgcaatatcatcctgaatctattttgagtgaatacggttatcgacaagttgaattatttttatcgaaggtaggtgattactgtgagaatagaatataattatcgctactatttaactgaaaatgaatataagcaataccatattcaattaaagggatttataaagaagtatgttgctactaagttggctgatgtgggagaagtgatacactttgcacaagcgcagcaacgacaaggtagatatgtctcgttatatttaagttacgaagcggcaaagtattttaatcatgctatgtgtacacattcattagctaaagatgatatttatgcagcagcttatagttttgaaaaagcggaaagcataaattcaacatatgaacatcaaacttcttatgtatcaaagtatcatttttcatttgttgaatcttctgaggttatgatgactaatattaaacgtgtccaacaagcaattgttgaaggcgaaacgtatcaagtgaactatacggcgcgcttaacggataacatttattatcctattagtactttatatgaacgattaactcaatttagtaatggtaattatactgcgttattacaaactgatgaaatccaagtagcgtctatctcaccagaattattttttcaaaaaggacaatttaacaatgtcgataacgttatcataagcaaaccgatgaaagggacaatgcctagaggtaaaacggaagctgaagatcaacagtattataaaacattgcaaacttcttcgaaagatcgtgcagaaaatgtcatgattgttgatttactaagaaacgatatagggagaatatcacagagtggctcaattaaggtgtataaactattttttattgaggcatataaaactgtatttcaaatgacttcgatggtaagtggaactttaaaaaataatacagacttaactcaaattttaacatcgttatttccttgtggttcgattacaggtgcaccgaaactgaatacaatgaaatatattaaacaattagaaagttcacctcgtggtatatactgcggagcaattggactattacttccaactgaagatgataaaatgatttttaatattccgattcgcactattgagtataaatatggacaagcgatttatggagtcggagcaggtattacaattgattctaagccaaaagatgaagtgaatgaattttacgcaaaaaccaagattttggagatgttataatgcaattatttgaaacaatgaaaattgataatggacatatccctagacttacttatcatactaatcgcataaaatgttcttctgagcgattaaactttaaatttgatgaacatgcatggcgaaatgaattaaacgatgtaacaacaaagtatcacagtggtcaatatagacttaaaatcgtattaaatgctgaaagcaaatttgaaacgatagtgtcacctttacctgagaaaagtagttttacagcaaaatttcaagtgttgcccaaagtagttaatccaacttttataaaaaataaaacgacagaacgaaagcatttagcacacaatcatgaaacagatttaatattgctaacttcagaggacggcaaggtccttgaatttgatattggcaacattgtcattgaagaggatggaaaatggtacacaccaagttataaagatgatttcttaaaaggatgcatgcgtgattatttaatagatagtgacaaacttgttgaaaaagactttaataaaaacgaattgatttataaatatcataacaatgagatacgtttatttttgataaatagtttacgagaggttgccgatgtccacctttgcctttaaaattagtatgataataaagtagaaaatgatgtgaaaacaaatttaaaaattaaatggggccaaatatgattattgtttatattgtgctgttgttaattcttgtatacgtaaattatcgattagtgaatcgattgctatctgaaaatagaatatatgttgttcgtttgatagcaacaattactactgttataagctttatccttgtatacgcattaattcacgaacttatgccttttgttgtgcgggcaatggatttaatgtaccaccagtaaatttagtgagtaggtaaaatgaactattcaatcgattctataattaaaaatgaaagtaaagtaaccaaatattgaagaggtgtacaaatgaaaatatatagtcaaggtgaccaagccattgtagtcgcaattgaaaaagaagtatctaaaagtttaaccgaagatttattaacacttcgctcatatttaattgaacaaaattatccatttattatagaaattgtgccatcagaatcagacatgatgattgtctatgacgcaagggatatgattaaacaccataatatacaatcaccttttttatacatgaaagcactaatagaatcgattcatttaaacataaaacatgattttaaccagcaagatttgattgaaataccaattgtgtatggttcgaaatatggtccggatttagaatcacttttaaaacattacaaaatcaagctagaaacttttattgaattacattctaaggcgcaatattttgtttcgatgatgggatattcacctgggtttccttatttaactggattaaataagaaattgtatattaatcacacgagtaaacagaaaaaattcattccagctggttctgtagtacttgaagggaaaaaatgcggtattgtaactacggatacaattaatgattggttagttattggttatacaccattatcactttttaatccgaaagaatcagatttcgcacgcttaaagttaggcgataatattaaatttagacctatcaatgaaaatgaattagaagtaggagcgtttaaagatgtcaatcataattgaaaaaagtggcttattcagtagctttcaggactttggcagaaggggatatgaacatgatggtgtaattccatgtggtgcacttgatactttagcacatgaaattgctaatcgattagttgcaaatgacaagaatgaagcaactttggaaatgactaataaaatggcaacgattcgttttacagaacctacgctgattgcattagcagggggtaatgtcaaagcttacactgagcatatgactatatctccatataaattgtatttgttagataaaggcgatgttttaaagtttagagaaacaagttatacatcgcgagtgtatttagctgtgggaggcggatttgaattagatgcatggttaggatctaactcaaccgactttaatgtaaaaattggtggttttaaaggtagaacattacaagatggcgatgaaataaagcttaagagagattatacagctcgtcatcataagttatttgaaaaccttgctcacacgaaacaaacagattggggtattgatggatacgccttgtcatttaattatatgtctgatgtatttcatgtcgttaaaaataaaggtacggaagattttaaagaagatgccattcaaagatttgtgaaacatgattataaagtaacgagcaaagcaaatcgcatggggatgatgcttgaaggtgaaaaaatcaaagctttttatgaagatatgccaccgtatcagactgtcaaaaaaggaacgatacaaattaagcgtgatggcacacctattatcctattaaatgatcattatacgctaggtagctacccgcaaatcggtacaatcgcaagttatcatttaacgaaattagcacaaaaaccgcaaggatcacgtttgaaatttcaatttatagatattttaacggctgaaaagaaccttgttaagtatagtaactggttaaaccaattattccatggaatagaatatagaatgcaattagaaatgatgaaataatatttggtacgtagctcatactcgagtccgatgcaaataatttcctcctaatgtataatgaaataatactgtgttttatctgcgaaatgtatcattttctaattcgtttcacagtaaaatgaaaagataaagtgtgtttttacttgaattttgactaaaattactctatatttattaattgagctatgcttattattacaatttgattacaaattttaaatttgttaattgaatgataatattaaataaagaaacttacacaagcaaatatgagttgtagcccaaaatacttgttaaatcaaagttgaaagctacaaataatgaaaattataaacttgaatctgaaagtaattactataattatgacaatgttaacttttaaacgcacttattaattaactacataatgttaatatctaatttattcaagtactttcgcaagatttattatctaaataacgggggaaagaatcatgagttcacaaaaaaagaaaattagtctttttgcgttcttcttattaaccgtaataacgattaccttgaagacgtatttttcttattatgttgatttttctttaggtgttaaaggtttagtacaaaacttaatattattgatgaatccttatagtttagtagcactggttttaagtgtgttcctattctttaaaggcaaaaaagcattttggttcatgttcataggcggcttcttattgacgttcctattatatgccaatgttgtgtactttagattcttctctgattttttaacgtttagtactttaaaccaagtaggtaacgtagaatctatgggtggtgcggttagtgcatcattcaaatggtatgactttgtttatttcattgatacgttagtttacttattcattttaatatttaaaacaaaatggttagacacaaaagcatttagtaagaaatttgttcctgtcgtaatggcggcttcagtagcattattcttcttaaacttagcttttgctgaaactgacagaccagaattattaacacgtacatttgaccataaatatttagtgaaatatttaggaccttataactttacagtatacgatggtgttaaaactatcgaaaataatcaacaaaaagcgctagcatctgaagatgacttaacaaaagtattaaattatacgaaacaacgtcaaacagagcctaacccagaatattatggggtggcaaagaagaaaaatattattaagattcatttagaaagtttccaaaccttcttaattaataaaaaggttaatggtaaagaagtaacaccgtttttaaacaaattatcaagtgggaaagagcaattcacatacttccctaactttttccatcaaacaggtcaaggtaaaacatctgactctgaatttacaatggataacagtttatacggtttaccgcaaggttctgccttttcattaaaaggagataatacgtatcagtcattaccagcaattttagatcaaaagcaaggctacaaatctgatgtcatgcacggtgactataaaacattctggaacagagaccaagtatataaacactttggtatcgataaattctatgatgcaacatactatgacatgtcagataaaaacgttgtaaacttaggcttgaaagacaaaattttctttaaagattctgctaattatcaagctaagatgaaatcaccattctattctcatttaattacattgactaaccactatccattcacattagatgaaaaggatgcaactattgagaaatcaaacacaggtgatgcaacagttgatggttatattcaaacagcacgttatttagacgaagcattagaagaatatattaatgacttgaagaaaaaaggattatatgacaattcagtgattatgatttatggtgaccactatggtatctctgaaaaccataacaatgccatggaaaaactattaggtgaaaaaatcacaccggctaaatttacagatttaaacagaactggtttctggattaaaatccctggtaaatctggtggtatcaataatgaatatgctggtcaagtcgatgtaatgccaacaattttacatttggctggtatagatacgaagaactatttaatgttcggtactgatttattctctaaaggtcataatcaagtagttccattcagaaatggtgactttataacaaaagattataaatatgttaatggtaagatttattctaataaaaataatgaactcataactactcaaccagctgatttcgaaaagaataaaaagcaagttgaaaaggatctcgaaatgagtgacaacgtgcttaatggtgatttgtttagattctacaaaaatccagacttcaaaaaggtaaatccttcgaagtataaatatgaaacaggacctaaagcaaactctaaaaaataatatctaaacacgaactcggattgataaaatatcaatccgggtttttattatgttcttttatattatgttttacattatatgtgttgataaaaaggtatattataaagatcattagcatagtcatcaaagccttaacaagttttatttatagttgaagcaacaatatattaaattatgacacttaacggtatcgatttcttttgatttcaaaaaggtgtataatgtatagaactgatttaagtacgtagagatttcaacagaagaaggaagatgggtatggaagcatataaaattgaacatttaaataaatcttatgccgataagactatattcgataacctagatttatcaatttcagaaggtgaaaaaataggtttagtaggcataaatggtacagggaaaagtacgttgttaaaagtaattggtggtattgatgatgattttacagccaatgttatgcatccaaatcaatatcgaattcgatattcgtctcagaaacaggaccttaatgaagatatgacagtttttgatgcagtattaagttctgatacaacaactttacgcatcatcaagcaatatgagcaggcagtacaagcttatgcggatgaccaaagtgataaattgttcaagcgaatgatggatgcgcaagatgctatggatcaacatgatgcttgggactataacgctgaaattaaaacaatcctctcaaaactaggtatacatgatactactaaatacattaaagaattatccggcggacaacaaaaacgtgttgtacttgctaaaacattaatagaacaaccagatttattgttattagatgaacctacgaaccatttagacttcgaatcaatcagctggttgatcaattatgtgaagcaatatcctcatactgttttattcgtaacccatgatcgatattttttaaatgaagtttccactagaattattgaactaaacagaggtaagttagcgtcatatcctggtaactatgaatcttatattgaaatgcgcgctgaaagagaagtaacacttcaaaagcaacaacaaaagcaacgagctttatataaggaagaacttgcttggatgagggctggagctaaggctcgtactacaaagcaacaagctagaattaatcgatttaatgacctagaaaatgaagttaaccagcaatataaagacgataaaggtgaattgaatcttgcttattcaagattaggtaagcaagtgttcgaattagaagacttatcaaaggctattaatgataaagtattatttgaacatctgacggaaattattcaaaaaggtgagcgtattggtgttgttgggccaaatggagctggtaaaacaacactcttaaatattttgagtggagaagaccaacaattcgaaggtaaattgaagactgggcagacggttaaagtagcttattttaagcaaacagatgagaccctggatagagatattcgtatgattgattatttaagagaagaaagtgagatcgcaaaagaaaaagatggaacctcggtatctattacacaacttcttgaacgatttttatttccaagtgcaactcatggtaaaaaagtttataaattatctggtggagagcaaaagcgtttgtatttattacgtctactcgtacaccagccaaatgttctgttgttagatgaaccgacaaatgatttagatactgagactttaacaatacttgaagattatattcatactttcggtggtacagtgattaccgtaagccatgatcgctacttcttaaataaagttgcacagtcatattggtttattcatgatggtcagatggaaaagattatcggaacttttgaagattatgaaagttataaaaaatcattagataaaaataaatccacattgaagcaacaatctaaatcttctacaactgtacgtaagaaaaatggtttatcatataaagaaaaattagaatatgaacaattgatgaaacgcatagaacaagcggaagtaagaatggaagaaattgatgtgctcatgattgaggcaagtgcagattatgggaaaattaaagaattaaacgaagaaaaagaacaacttgaaattcaatatgatttagacatcacaagatggagtgagttagaagaaattaaagaacaacaataaggggtcaatttatgatgcaacaaacattatcgcattactttgggtatgaaacgtttcgaccaggacaagaagaaattattagcaaagtattagaccatcgtaatgtgcttggtgtcttaccaactggtggaggtaagtctatatgctatcaagtaccaggtttattgttaggtggtacaacaattgtaataagtccactaatatcattaatgaaagatcaagtggatcaattaaaagcgatgggaattcaagctgcttttttaaatagtagtttgactcaaaaagagcaacaacgtattgaaaaagcattatcaaatggagaaattcaatttttgtatgttgcaccagaacgatttgaaaaccgatattttttaaatatgcttcagcgtataaagattcacttagtcgcgtttgatgaagcgcattgtatttctaaatggggtcatgatttcaggccgagttaccaaaatgttatttcaaaagtatttacgttacctcaagattttacaataatagcgttgacagcaactgccacggttgaagtacagcaagatattagagaaaagttaaatatcgctcaaactgatcaaattaaaacgagtactaagcgtagaaacttaatttttaaagtaaatcctacttatcaacgtcaaaaatttatattggattatattaaaacacacgatgaagatgcaggtattatttattgttctacacgtaagcaagttgaagagcttcaagaagccttagaaagtcagaaaattgaaagtgttatatatcatgcaggtttgagcaataaagaaagagaagaagcgcagaatgatttcttatttgatcgtgttaaagtagtcgttgctacaaatgcttttggtatgggtattgataaatccaatgtacgctttgttattcattataatatgcctggagatttagaatcttattatcaagaagcgggtcgtgcaggtcgtgacgggttgaaaagtgaatgtattttgttatttagcgaacgcgatatcaatttacacgagtattttataacagtctctcaagctgatgatgactataaagataaaatgggcgaaaagttaactaaaatgattcaatatacaaaaacaaaaaaatgtctagaagcaacaattgtccattattttgaaccgaatgaaaaattagaagaatgtgaacaatgtagtaattgtgttcaacaagataaatcatataatatgacacaagaagctaagatgattattagttgcatcgctcgtatgaaacaacaagagagttatagtgttatcattcaagtgttaagaggagagtcaacagattatattaagtataaaggttatgaccaaatttcaacccatggtttaatgaaaggttacacaacatcagaattaagtcacttaatagatgaattaagattcaaagggttcttaaatgaaaatgacgaaatattaatgtgtgatacttcaattaaaaaattactcagtaatgaagtagaagtattcacaacaccatttaagcaaaaagcgactgaaaaagtatttataaatacggttgaaggggttgaccgagtattattcagtcagttggtagaagttcgtaaaaagttaagtgacaaattaacgatagcacctgtaagtatattttctgattacacgttggaggaatttgctaaacgtaagcctgcttcgaaacaagatatgattaatattgatggcgtaggtagttacaaattaaaacattattgtccagcatttttagaaacgattcaaaattataaagccaaagtatagtgaagacacctagtaagcattccttgttttactgggtgtttttttgaattcaaggtaaaataacactatttcttaactggagattacctattattcattattttattaaaaaagttcaaggataaatcatttaaatttgaaaattgtaataaacgtggttaaatagggaatacatacatataatctcggttttatgctatgagaaaaaaagaggtggcaaagtgattaagtttaaaaatgtaactaagcgttatggcaaacatgttgctgtcgataacattagtttcaatattaatgagggtgaattttttgtgctaattggaccttcaggttgtggaaaaactacgacattaaaaatgattaatcgactcattcacttaagtgaaggttatatttattttaaagataaaccaataagtgattatccagtatacgaaatgcgttgggatattggatacgtattgcagcagattgcattattcccacatatgacaatcaaagaaaatattgcacaagtgccacaaatgaaaaagtggaaagaaaaagatatagataaaagagtagatgaattacttgaaatggttggattagaacctgaaaaatataaaaacagaaaacctgatgaattgtcaggggggcaacgacaacgtgtaggagttatacgtgcgttagcagctgatccaccagttattttaatggatgaaccgtttagtgcattagacccaatcagccgagaaaaacttcaagatgatttaattgaattacaaactaaaattaagaagacaatcatatttgttacacatgatattcaagaggcgatgaaacttggtgataagatttgtcttttgaatgaagggcatattgaacaaattgacacaccagaaggatttaaaaataatcctcaaagtgaatttgttaaacaatttatgggtagtcatttagaagatgatgcgccatgtgttgaagagaacgcaattatccgtgacttggatattatgaaaccaatcgatgaggttacatctatgagcgcttatccaattgtttatgacaatcaaccaattgaagtattgtatcaacttttatcagagagcgagcgtgtcattgtcatgcaagaagatagcgtaggtcaatatgttattgataggaaagatatcttcaaatatttgtcccagaaaaaggaggtagctcaacatgactaactttttcgacatattgagtgaacgtaaggggcaactcttttcgacaatgatagaacatattcaaatatcatttatcgcattattgattgcaactgctattgcggtaccattaggtattttattaacgaagactaaaacgatatctgaaatcgtaatgaatattgcggcaattcttcaaaccataccatcgttggcattattaggtttaatgattcctttatttggtatcggtcgtgtgccagcaattattgcacttgtagtgtatgcgttgttaccaattttaaggaatacgtatactggaattaaagaagttgatccatcactcattgaagcggctaaaggtataggtatgaaaccatttagacgtttaactaaagtcgaacttccgatagcaatgcctgttataatggctggtgtaagaacggctatggtattaattataggtacagcaacactagcagcattaattggtgcaggcggactaggagatttaattttattaggtatagaccgtaacaatgcatcgttgatattattaggtgcaattccagcagccttattggcaattatatttgatttaattttaagatttatggctaaattatcttataaaaagttattgatgacgttaggtgttatagtgatgattattatactggctatcgctattcctatgtttgcacaaaaaggtgataaaattacgttagctggaaagcttggctccgagccatcgattattacaaatatgtataaaattttaatagaagaagagaccaaaaatactgtagaagtgaaagatggtatgggcaaaacagcatttttatttaatgctttaaaatctgacgatatagatgggtatttagaatttactggaacagttttaggtgaattaacaaaagaaccattgaagtcaaaagaagagaaaaaagtttatgaacaagctaagcaaagtcttgaaaagaaatatcaaatgactatgttaaaaccaatgaagtataacaatacgtatgctttagctgtaaaacgtgattttgctaaacaacataatatacgtacaattggtgatttaaataaggttaaagatcaacttaaaccaggatttacattggaatttaatgatcgtccagatggttacaaagctgttcaaaaggcttataatttaaatttagataacatacgtacaatggaacctaagttgagatatcaagcgatcaataaaggtaatattaatttaatagatgcatattcaactgacgctgaattaaaacaatatgatatggttgtgttaaaagatgataagcacgtatttccaccatatcaaggagcaccattatttaaagaaagctttttaaagaaacatccagaaattaagaaaccgttaaacaaactagaaaacaaaatatctgatgaagatatgcaaatgatgaactataaagtaacagttaaaaatgaagacccatatacagttgcgaaagattatttaaaagcaaaagggttaatcaaataacgaccaacgccacataagatgcgtaacaccaaattatatcttatgtggcgttgttatatttaaatctataattatgttcaatttaaacatgcaataatgattaaaaaatatgacatgttaaacacaatgtaagctattatgatgtgaaaatagtagcattgcattttagaaacatagagcgatataatgaatataagttttttgaaatttcagttaattctaaggaggttgtttttattatgaaagaacaacttaatcaactatcagcatatcagcctggtttatctccaagggcattgaaagaaaagtatggcattgaaggagatttatataaacttgcatcaaatgaaaatttgtatggaccatcgcctaaagttaaagaagcgatatcagcacacttagatgagttatattattatcctgaaacaggatcaccgacattaaaagcggcgattagtaaacatttaaatgtagatcaatcacgcattttatttggtgcgggattagatgaagttatattaatgatttctagagctgtattaacgccaggggatactattgttacaagtgaagcgacattcggtcaatattatcacaatgcgattgttgaatcagctaatgtgatacaagtacctttaaaagatggtggcttcgatttagaaggtattttaaaagaagttaatgaagatacgtcattggtatggttatgtaatccaaataatcctacaggtacatattttaatcatgagagcttagattcgtttttatctcaagtacctccacatgtaccagtaattatagatgaagcttattttgaatttgtgacagcagaggactacccggatacacttgctttgcaacaaaaatatgacaatgctttcttattacgtacattttcaaaggcgtatggattagcgggtttacgtgtaggatatgtggtagcaagtgaacatgcgattgaaaaatggaacatcattagaccaccatttaatgtgacacgtatatctgaatacgcagcagttgcagcacttgaagatcaacaatatttaaaagaggtaacacataaaaatagtgttgaacgcgaaagattttatcaattacctcaaagtgagtatttcttgccaagtcaaacgaattttatatttgtaaaaacaaagcgggtaaatgaactttatgaagcacttttaaatgtagggtgtattacgcgaccatttccaactggtgttagaattacaattggttttaaagaacaaaatgataaaatgttagaagttttatcaaactttaaatacgaatagtaagtggggagtgggacagaaatgatattttcgcaaaatttatttcgtcgtcccaccccaacttgcattgtctgtagaaattgggaatccaatttctctttgttggggccccgccggcaaggttgactagaattgaaaaaagcttgttacaagcgcattttcgttcagtcaactactgccaatataactttgtagagcattgaacattgatttatgtctcaagctcaatgcagtgtgaatgatgaggtgagagtattcagtgtaaaaagcaacaatagatgatattgttttgtatcaattgcttttttgctatactgaatcaatactgatattttcaggagaagattaaaatgacccgtaaatcaatcgcgattgatatggatgaagtattggcagatacattaggagaaatcattgatgctgtcaattttagagcggatttaggtattaaaatggaagctttgaatggtcaaaaacttaaacatgttattcctgaacatgatggattaattacagaagtattgagagaaccaggcttcttcagacatcttaaagtgatgccgtatgcacaagaagttgtgaaaaaattaactgaacattatgatgtatatattgctacagcagcaatggatgtaccaacatcatttagtgataaatatgaatggttactagagttctttccatttttagatcctcagcattttgttttttgtggtagaaaaaacatcgttaaagctgattatttaatagatgacaatcctagacagcttgaaatttttactggtacaccgattatgtttacagcagtgcataatattaatgatgatcgatttgaacgcgtaaatagctggaaagatgtagaacagtattttttagataatattgagaaataaaatatatcacttgaaaaatttcatgtagaaaagatgatggataggctataaagtaattgtgactgagatgaacttttatgtcttagacactacaacactatattggcagtagttgactgcggggccccaacatagagaaattggattcccaatttctacagacaatgcaagttggggtgggccccaacataaagaaatactttttctttagaaattagtatttcttatgcatgagtgtaactcatgcattcatatttttaagtacacattagctgtgactaatgataaagaatcgctacataatcaatcattagtcgttctttatcatttccgtcccgctctcaataaatgttagtctatcttattattataaatcggatgaatgtgttaatctatggcagattacacgtcatccgattttttatagaatttgaaaaagacgcataaaccactatgatttaaaatacaacatcaatcattttagtggcatgcgccaaaattatatgtctgtttttgaaacagggtaatagcttaaagctaataaaaacgaatataaggtgcgttgaatcttatgattacactccaaacctaatataatatcgggttaagatcattccggatgcttacaaatcattgacagtaagtaactgaatggcatttggtataacctcaatatcaataggtgtttctaatgaaatttcgccatcaatatcaactttcattgctggatctgttgtaagtgaaatctttttaccaggtatatgctcaataccttgagtaatttcattccaattcatgctatcacgctttttaaaaatatcatttaaaatactgaaactttgttcattaaaaatgaaagtgttcagttcaccatcttgaggagacaaatcagtcaatggtatacgactaccaccaatgaatggaccatttgctgttagtatcatggtcgtttcgccagaatatgtcttatcatctattgataattgataattaaattgtgttggatttagcagtgttttgacagttgatccaatataactcaatttaccaaatatatcttttgaaccatcttgtacgttttcagcgttttgaacaatgagacctaagccaacaaagttgagtgcatattgattatttattttaattacatcgtatgtaccaacttgtgcagaaatcatttgttcactagcttgtttatgattaggtgctatatttagcgtttttgtaaaatcattaaaagtaccgcctggtaaaatgccaatagggagttgaaggtcatgtgtcataacaccgtttataagttcgttaaccgtgccatcaccgccaagaataaataatatatctacatcttttgcatagtttttagttttgatttcttggcaatatttaataatgtcaccttcgttttcactcaattgaatagaaagatgcttacaaattgaacttaatgctgttgtaacttccccaataccttgattaatattttttaatccactgtgttcatggtaaaagaggacaccatgtgtatatttattttccatagtttagcctactttctaaaaattggttcattaaatatatatacccacttttaattgttaataccaaaaatatgtttttaaatagagaaaatggtaataaatgaaattgatttctatagagtgggacgagaaaatatagttatagctgtctataatgagcatattaagtttttatttatactgatatcttgaatttaattaatagaaacctataaaaaaacagtaagccatttaaatgacttactgttttttgaattaggccaacaatattaacgtatacctttcatcgctttgatgattaaaggtgagaatgctaatacaattgttgtaacaataattgcaacaacacctaggaaaataaagtaatttgtttgacctagtggttctattaacttaactaaagtaccattgattgcttgtgcagaagcgttagttaagtaccaaatactcatcatttgggcattaaatgctttaggtgctaacttaacagcagcactattacccgttggtgataagcatagctcaccgataacacaaataatgtacgataaaataacccagttaactgaaaagtttgatgaacctgatgcataacctacaataccaattagtatgtatgacgcacctgctaagaacgtaccaattgcaaattttactggcaggctaggttgtttagttccaagcttttgccataaaagtgaaataattggagctagtaataaaataaataatgggttaattgattggaagatcgcttcaccaaagtttgttttccaaccaaataagtttaatttcatatctgaatgttcaattccatatatgtttaatacattagacccttgttcttgaatagcccagaacaccattccaagaataaataatggaataaatgctttaacacgagaacgttcagtatcagtgacatctttacttctaataattaaagtgaagtaaatgattggtaatgcaatacctaatactaaaacagtattactaactaagttaaatgataatgagttagttaatgcaccaataacgataattaatacaattgctaaaacaacacttccgataataagaccatactttttcttttcagctggtgtcaatgggttagtaggtttcataccaacgctacctaagtttttgcggttgaaaagtacataccatactaaacctaatgccataccaactgctgcaatcaagaatccgccgtggaagtttttaacattaacaaagtgttgcaaaataataggtgataataatgcacccatattaactgacatatagaaaataacaaaacctgcatccatacgtctatcattttcaggatataaacggccaacgatatttgaaatgtttggcttcattaaacctgaaccaataatgatgaagaacattgatgtgaataagccgattaatgcaaatggtaagcttaaacaaatatgtccgataataataaagactgcacctaataaagtagcgcctctagtgcctgtaattctgtcagcaatccatccgcctggtattgatgtcatatagattaatgaaccataaactgacataattgacatagctgttgttttatcaattccaaggccattatctgttacggcaaagtacatgtagaaaatgagtagggcacgcatgccataataactaaacctttcccagaactctacaaagaagagtacgcctagtcctcgaggatgcccgaaaaatcctgtttgaggtatgtcttgaatttgatttccatgggagttttgttgtgtcatgtatacatcccatcctttcttcccctaatacaatagtttaagtaaatttgattgtgccttatcaactaaatattccaacaaatcacaaaaaaataaaaatattgagaatattctgttattaagcgcgcacaattaattagagataatataaaaatatacttattgacgttaaagtgcaataggtttctataaaaatgttgtttaattcgtgtactaatattcttttggtgtactttggtataaaatgttattttaatgtaacctattatgtatgctaaatgaaaaacacaccaataagttaggaaaatcaacttattggtgtgtttattaaatgatacatttaacgattatctattttttcgggatataaatcatgattcatcaaacgatgctcagccattttttcatatttagaatttggacgtccatagtttgtataaggatcaatagaaattccaccacgtggtgtgaacttgccccagacttcaatataatgtgggtccataagctctatcaaatcattcataataatattcatacaatcttcgtgaaaatcaccgtgatttctgaaactaaataagtataatttcaaagattttgattcaaccattttaacatttggaatatatgaaatatagatagttgcaaaatctggttgcccagtaattggacataatgatgtaaattctggacagttgaattttacgaaatagtcacgaccttgatgcttattatcaaacgattctaatacatcaggacgatagtcaaaattgtaagtattgtcttgatttcctaataaagttatatcttgtaattcatcttgttgacggccatgtgccatataaagcgctcctttaaatttatttttttattattttggcgtctcggcgtgctttttcaaacatgtaataacttgcaccgataataacgacgtaacctaatgttgcatagaaatctggagattctccgaatagaataaatccaagtattgctgtgaaaattatagatgcatacgtaaaaatagaaatatcttttgctgctgcaaaactatatgctaaagtaacaccaatttgacccacagcggcagctaagccagcccctaatagataaagtatttgcatctgactcattggttcataagtatatgcagtgaaaggtattaaaacgatgacagaaaataaggagaagtaaaatactatagtatatggtgcttctcttgtactaagtgctcgaacacatgtatatgctgatgctgcaaaaatacctgagaataagccagctaatgatggaatcatagatgatgaaaattcaggtttcactattaaaagcatacctaaaatagcaattatcattgctgtaatttgatacttccttaccttttcatgtaagaaaacaatgcttaataaaatcgtccagaaaggattgagtttcattaatgaatcggcatcactaagtaccatatgatcaatggcataaatatttaacaatacaccaataagtccaagtgttgatcgtgttattaataagggttgacttgaaagtctgccaaacattggctgatggtatttatatataaaaaataatggaataaacattgctactaagtttcgtgctaatgatttttgaaaaacaggaaggtcacctgcaagtctgaaaaacactgacataaaactgaaaccaatagccgaaattaaaatggcaatgataccttttactttaggattcaattttatcgcctcttttatataaaattaacgtatttatattagcataaaacaacatgttgtgcataaatagttgaaatttactataaaaagactataatagactgtagcgaacaaacgttctgtgtttatttgtcggaataatagggcattacacttttatgaatgtttgtgttattacataaaacaaatatcaattcagtatcaagctaataagctttttcttgatttctgttgatacaattgagattgacacagatttaaaaaaatcaagtgatatctactaaaaaatttttttaaatttgttcaagtttttctaatttagtattggtgcctagttggaacgttttacgaacattcgattagaaaatggcactttaaatcatagtgtgtcttatgtataatgaaacacataatatagtgttggtgaaacgaaaaagacacaatatcttgtgttttgtatgcaaatgctttatttatgaagaaattacatttaaaagtaatttaacacagaaatttaatagttattatcaattaatagtcatatttttagaaaatgtactgagcaaatggaagatatccaatgatgtaaacactacatatagtgatttttatacattcaacccatataagctactattttctcaaatataaatctatgcaattggtttacatttgagaaaataagtagcttcattatagttaatacaatgctgagataaccatagtaaccatgttgttaaagcattttttaattggaatgactactttatttaaaagggttgaagaaagaaggtgatccaatgaaaataatatatttttcatttactggaaatgtccgtcgttttattaagagaacagaacttgaaaatacgcttgagattacagcagaaaattgtatggaaccagttcatgaaccgtttattatcgttactggcactattggatttggagaagtaccagaacccgttcaatcttttttagaagttaatcatcaatacatcagaggtgtggcagctagcggtaatcgaaattggggactaaatttcgcaaaagcgggtcgcacgatatcagaagagtataatgtccctttattaatgaagtttgagttacatggaaaaaacaaagacgttattgaatttaagaacaaggtgggtaattttaatgaaaaccatggaagagaaaaagtacaatcatattgaattaaataatgaggtcactaaacgaagagaagatggattctttagtttagaaaaagaccaagaagctttagtagcttatttagaagaagtaaaagacaaaacaatcttcttcgacactgaaatcgagcgtttacgttatttagtagacaacgatttttatttcaatgtgtttgatatttatagtgaagcggatctaattgaaatcactgattatgcaaaatcaatcccgtttaattttgcaagttatatgtcagctagtaaatttttcaaagattacgctttgaaaacaaatgataaaagtcaatacttagaagactataatcaacacgttgccattgttgctttatacctagcaaatggtaataaagcacaagctaaacaatttatttctgctatggttgaacaaagatatcaaccagcgacaccaacatttttaaacgcaggccgtgcgcgtcgtggtgagctagtgtcatgtttcttattagaagtggatgacagcttaaattcaattaactttattgattcaactgcaaaacaattaagtaaaattgggggcggcgttgcaattaacttatctaaattgcgtgcacgtggtgaagcaattaaaggaattaaaggcgtagcgaaaggcgttttacctattgctaagtcacttgaaggtggctttagctatgcagatcaacttggtcaacgccctggtgctggtgctgtgtacttaaatatcttccattatgatgtagaagaatttttagatactaaaaaagtaaatgcggatgaagatttacgtttatctacaatatcaactggtttaattgttccatctaaattcttcgatttagctaaagaaggtaaggacttttatatgtttgcacctcatacagttaaagaagaatatggtgtgacattagacgatatcgatttagaaaaatattatgatgacatggttgcaaacccaaatgttgagaaaaagaaaaagaatgcgcgtgaaatgttgaatttaattgcgcaaacacaattacaatcaggttatccatatttaatgtttaaagataatgctaacagagtgcatccgaattcaaacattggacaaattaaaatgagtaacttatgtacggaaattttccaactacaagaaacttcaattattaatgactatggtattgaagacgaaattaaacgtgatatttcttgtaacttgggctcattaaatattgttaatgtaatggaaagcggaaaattcagagattcagttcactctggtatggacgcattaactgttgtgagtgatgtagcaaatattcaaaatgcaccaggagttagaaaagctaacagtgaattacattcagttggtcttggtgtgatgaatttacacggttacctagcaaaaaataaaattggttatgagtcagaagaagcaaaagattttgcaaatatcttctttatgatgatgaatttctactcaatcgaacgttcaatggaaatcgctaaagagcgtggtatcaaatatcaagactttgaaaagtctgattatgctaatggcaaatatttcgagttctatacaactcaagaatttgaacctcaattcgaaaaagtacgtgaattattcgatggtatggctattcctacttctgaggattggaagaaactacaacaagatgttgaacaatatggtttatatcatgcatatagattagcaattgctccaacacaaagtatttcttatgttcaaaatgcaacaagttctgtaatgccaatcgttgaccaaattgaacgtcgtacttatggtaatgcggaaacattttaccctatgccattcttatcaccacaaacaatgtggtactacaaatcagcattcaatactgatcagatgaaattaatcgatttaattgcgacaattcaaacgcatattgaccaaggtatctcaacgatcctttatgttaattctgaaatttctacacgtgagttagcaagattatatgtatatgcgcactataaaggattaaaatcactttactatactagaaataaattattaagtgtagaagaatgtacaagttgttctatctaacaattaaatgttgaaaatgacaaacagctaatcatctggtctgaattagcagatgattagactgctatgtctgtatttgtcaattattgagtaacattacaggaggaaattatattcatgatagctgttaattggaacacacaagaagatatgacgaatatgttttggagacaaaatatatctcaaatgtgggttgaaacagaatttaaagtatcaaaagacattgcaagttggaagactttatctgaagctgaacaagacacatttaaaaaagcattagctggtttaacaggcttagatacacatcaagcagatgatggcatgcctttagttatgctacatacgactgacttaaggaaaaaagcagtttattcatttatggcgatgatggagcaaatacacgcgaaaagctattcacatattttcacaacactattaccatctagtgaaacaaactacctattagatgaatgggttttagaggaaccccatttaaaatataaatctgataaaattgttgctaattatcacaaactttggggtaaagaagcttcgatatacgaccaatatatggccagagttacgagtgtatttttagaaacattcttattcttctcaggtttctattatccactatatcttgctggtcaagggaaaatgacgacatcaggtgaaatcattcgtaaaattcttttagatgaatctattcatggtgtatttaccggtttagatgcacagcatttacgaaatgaactatctgaaagtgagaaacaaaaagcagatcaagaaatgtataaattgctaaatgacttgtatttaaatgaagagtcatacacaaaaatgttatacgatgatcttggaatcactgaagatgtgctaaactatgttaaatataatggaaacaaagcactttcaaacttaggctttgaaccttattttgaggaacgtgaatttaacccaatcattgagaatgccttagatacaacaactaaaaaccatgacttcttctcagtaaaaggtgatggttatgtattagcattaaacgtagaagcattacaagatgatgactttgtatttgacaacaaataacaattaaattaaaagaccttcacatgtaaagggaaatagcgattcgtttcgtcttgtctcctacatgttgaaggtctttttttatgtgtatctaactcattatgagtctgagtaagaaatcaatgctctaagatgtacaatgctatttatattggcagtagttggcggggccccaacacagaagcaggcggaaagtcagctaacaatattgtgcaagttggcggggccccaacatagaagcaggcggaaagtcagctaacaataatgtgcaagttggcggggccccaacataaaagcaggcggaaagtcagctaacaatattgtgcaagttcgggcggggccccaacataaagaaaaactttttcctttagaaattatcacttccacatgagttttactcatgtattcctatttttaagtacacattagctgaggctaatgttaagaaccactacttaatcaatcattagtagtttttatcatttccactattcccagacatcaaaatcttaagtgttctattttactttaagtaaacaaaatacacattccgaaaaattaaatttcagtttaattgcaaatatcaataaaattgacactaaattatttgaaaggctattgaaattatggtcaaaaaacgctactattaatgagaaatattatcaatgataatgattatcattaatttaaagggagaaaaatttgtaatgaagtatttattaaagggaaatattttgcttctattactaatattgttgacaattatttcgttgttcataggtgtgagtgaactatcaattaaagatttactacatttaactgagtcacagcggaatattttattctcaagccgaataccaaggacgatgagtattttaattgctggaagttcgttggctttagcaggcttgataatgcaacaaatgatgcaaaataagtttgttagtccgactacagctggaacgatggaatgggctaaactaggtattttaattgctttattgttctttccaaccggtcatattttattaaaactagtatttgctgttatttgcagtatttgcggtacgtttttatttgttaaaatcattgattttataaaagtgaaagatgtcatttttgtaccgcttttaggaattatgatgggtgggattgttgcaagtttcacaaccttcatctcattgcgcacgaatgctgttcaaagcattggtaactggcttaacgggaactttgccattatcacaagtggacgctatgaaattttatatttaagtattcctcttttagcattgacatatctttttgctaatcatttcacgattgtaggaatgggtaaagactttactaataatttaggtttgagttacgaaaaattaattaacatcgcattgtttattactgcaactattacagcattggtagtggtgactgttggaacattaccgttcttaggactagtaataccaaatattatttcaatttatcgaggtgatcatttgaaaaatgctatccctcatacgatgatgttaggtgccatctttgtattattttctgatatagttggcagaattgttgtttatccatatgaaataaatattggtttaacaataggtgtatttggaacaatcattttccttatcttgcttatgaaaggtaggaaaaattatgcgcaacaataataaaaaaataatgcttttaattgcagtaacgttattaattagtatgctgtacttatttgtaggtattgattttgaaatatttgaatatcaattttcaagtcgtttaagaaagttcatattaattattttagtaggtgctgccattgcaacttcagtggtgatttttcaagcgattacaaataaccgtctattgacaccatcaataatggggttagatgcagtttatttatttatcaaagtattgccagtctttttatttggaattcaatcggtatgggttactaatgtatatttgaactttatattaacacttataacgatggtgttattcgcactaatcctattccaaggtatctttaaaatcggacatttttcaatttattttatcttacttattggtgtccttttaggaacattttttagaagcataacaggttttattcaactgattatggatcctgagtcatttttagcaatacaaagtagtatgtttgctaattttaatgcttctaattcgaatttagttactttctcagcagtgctattagtaatcttattagtcattacaattttactattgccttatttagatgtattgcttttaggtcgtgctgaagcaattaatcttgggatatcgtatgaaaaattaacgcgaattctacttgtaatagtctcagttttagtttctgtgtcaactgcattagtaggaccaattacatttttaggtttattaactgtaaatctagcgcatgaactaatgaagacgtatgaacataagtatattttaattgcgacaatttgcttgagttggattagtttatttagtgcgcaatgggtagttgaaagtgtgtttgaagctacgacagaaatgagtatacttattgatttgattggtggaagttatttcatttatctattagttagaaggagaaatgcgcaatgattcaagttgaaaatttaactaaaactataaataatcaaatgatattggaagatattagcatagatatcgaaaaaggtaaattgacttctttaattggacctaatggtgcgggtaagagtactttactttcagcgatatgtaggttaattcgttttgagaacggtgaagtgaaaatagatggacagctcatgtctgattataaaaataatgacttgtcgaaaaaaatatctatattaaaacaaacaaaccatactgaaatgaatattacggtagagcagttggtaaactttggacgattcccttattctaaaggtcgtttgacgaaagaggatcatgatattgtcaatgatgcgctagatttgttgcaactacaagatatcagaaatcgtaatattaagtcattatctggtggacaacgtcagcgtgcatacattgcaatgacaatagcacaagatactgaatatattttgctagatgaaccattaaataatttagatatgaagcatgctgttcaaattatgcaaacgttaaaaatgttagcgcataaaatgaataaagcgattgtcattgtgttacatgatattaactttgcgtcctgttattcagatcagattgtagcattgaaaaacggacaactagttaagtcagatttgaaagataatgtcattcaaagtagtgttttaagtgatttatatgacatgaatattcaaattgaacatataagaaatcaaaggatttgtttatattttaaggattgataatttggagacactttaaaggggtgatgcgccaattaaagaagggttaaacgtaaagcatttatttatatttcacatcaagcacacagattaagccaaaagaggagaatattatattatgaagaaaacagtcttatatttagtattagcagtaatgtttttattagcggcatgcggtaacaattctgataaagaacaatcaaaatcagaaactaaaggttctaaagatacagtaaaaattgaaaataactataaaatgcgtggcgagaaaaaagatggtagtgacgctaaaaaagttaaagaaactgttgaagtaccaaaaaatcctaaaaatgcagttgtgttagactatggcgcattagatgtaatgaaagaaatgggcttatcagataaagtaaaagcattacctaaaggggaaggcggtaagtcattaccgaatttcttagaatcatttaaagatgataaatatacaaacgttggtaatttaaaagaagtgaattttgataaaattgctgcgacgaaacccgaagtaatctttatctctggacgtacagctaatcaaaagaatttagatgaattcaaaaaagctgcacctaaagcgaaaattgtttatgttggtgcagatgaaaagaacttaattggttcaatgaaacaaaacactgaaaatatcggaaaaatttacgataaagaagataaagctaaagaattaaataaagatttagataacaaaattgcttcaatgaaagataaaacgaaaaacttcaataaaactgttatgtatttactagttaacgaaggtgaattatcaacatttggacctaaaggtcgttttggtggattagtttacgatacattaggattcaatgcagttgataaaaaagtaagtaatagcaatcatggacaaaatgtttctaacgaatatgttaataaagaaaatccagatgttattttagcgatggatagaggtcaagcgataagtggtaaatcaactgcgaaacaagcattaaataatcctgtattaaaaaatgttaaagcaattaaagaagacaaagtatataatttagatcctaaattatggtactttgcagctggatcaactacaactacaattaaacaaattgaggaacttgataaagttgtaaaataattttaaaagaggggaacaatggttaaaggtcttaatcattgctcccctcttttctttaaaaaaggaaatctgggacgtcaatcaatgtcctagactctaaaatgttctgttgtcagtcgttggttgaatgaacatgtacttgtaacaagttcatttcaatactagtgggctccaaacatagagaaatttgattttcaatttctactgacaatgcaagttggcggggcccaaacatagagaatttcaaaaaggaattctacagaagtggtgctttatcatgtctgacccactccctataatgttttgactatgttgtttaaatttcaaaataaatatgatagtgatatttacagcgattgttaaaccgagattggcaatttggacaacgctctaccatcatatattcattgattgttaattcgtgtttgcatacaccgcataagattgctttttcgttaaatgaaggctcagaccaacgcttaatggcgtgcttttcaaactcattatggcacttatagcatggatagtatttattacaacatttaaatttaatagcaataatatcttcttcggtaaaataatggcgacagcgtgtttcagtatcgattaatgaaccataaactttaggcatagacaaagctccttaacttacgattcctttggatgttcaccaataatgcgaacttcacgatttaattcaatgccaaatttttctttgacggtcttttgtacataatgaataaggttttcataatctgtagcagttccattgtctacatttaccataaaaccagcgtgtttggttgaaacttcaacgccgccaatacggtgaccttgcaaattagaatcttgtatcaatttacctgcaaaatgaccaggcggtctttggaatacactaccacatgaaggatactctaaaggttgtttagattctctacgttctgttaaatcatccattttagcttgtatttcagtcattttaccaggagctaaagtaaatgcagcttctaatacaactaagtgttctttttgaataatgctattacgataatctaactctaattcttttgttgtaagtttaattaacgagccttgttcgtttacgcaaagcgcatagtctatacaatctttaacttcgccaccataagcgccagcattcatatacactgcaccaccaattgaacctggaataccacatgcaaattcaaggccagtaagtgcgtaatcacgagcaacacgtgagacatcaataattgcagcgccgctaccggctattatcgcatcatcagatacttcgatatgatctagtgataataaactaattacaataccgcgaataccaccttcacggataataatatttgagccatttcctaaatatgtaacaggaatctcattttgataggcatatttaacaactgcttgtacttcttcatttttagtaggggtaatgtaaaagtcggcattaccacctgttttagtataagtgtatcgttttaaaggttcatcaactttaattttttcatttgggataagttgttgtaaagcttgatagatgtctttatttatcacttctcagtacatcctttctcatgtctttaatatcatatagtattataccaattttaaaattcatttgcgaaaattgaaaagaaagtattagaattagtataattataaaatacggcattattgtcgttataagtattttttacatagtttttcaaagtattgttgcttttgcatctcatattgtctaattgttaagctatgttgcaatatttggtgtttttttgtattgaattgcaaagcaatatcatcattagttgataagaggtaatcaagtgcaagataagattcaaatgtttgggtattcatttgaatgatatgtagacgcacctgttgttttagttcatgaaaattgttaaacttcgccatcataactttcttagtatatttatgatgcaaacgataaaaccctacataatttaagcgtttttcatctaaggatgtaatatcatgcaaattttctacacctactaaaatatctaaaattggctctgttgaatatttaaaatgatgcgtaccgccaatatgttttgtatattttactgggctgtctaagaggttgaataataatgattcaatttcagtgtattgtgattgaaaacaattagttaaatcactattaatgaatggttgaacatttgaatacatgataaactcctttgatattgaaaattaatttaatcacgataaagtctggaatactataacataattcattttcataataaacatgtttttgtataatgaatctgttaaggagtgcaatcatgaaaaaaattgttattatcgctgttttagcgattttatttgtagtaataagtgcttgtggtaataaagaaaaagaggcacaacatcaatttactaagcaatttaaagatgttgagcaaaaacaaaaagaattacaacatgtcatggataatatacatttgaaagaaattgatcatctaagtaaaactgatacaactgataaaaatagtaaagaatttaaggcactacaagaagatgttaaaaaccatctcatacctaaatttgaagcatattataagtcagcaaaaaatttgcctgatgatacaatgaaagttaagaaattaaaaaaagaatatatgacgcttgcaaatgagaagaaggatgcgatatatcaattaaaaaaattcataggtttatgtaatcaatctatcaagtataacgaagacattttagattatacgaaacaatttgaaaaaaatagatacaaagttgaatcagaaattaaattagctgataataaaagtgaagcaactaatcttacgacaaaattagaacataataataaagcgttaagagatactgcgaagaagaacctagatgatagtaaagaaaatgaagtaaaaggcgcgattaaaaatcacattatgccaatgattgaaaagcaaattaccgatattaaccaaactaatattagtgataagcatgttaataatgcaaggaaaaacgcaatagaaatgtattacagtctgcagaactattataatacacgtattgaaacaataaaggttagtgagaagttatcaaaagtcgatgtagataagttgccgaaaaagggtatagatataactcacggcgataaagcctttgaaaaaaagcttgaaaaattagaagaaaaataactataatcatttttcaaagttaaaaattttgaatttatggttaacatgtcaacttactatgtgtataatggtaaacattgatattaactatatgtataaaaatgtcacgcagatgctatttaaatgtgataaatatttttagaggtgaatagagtggctataaagctaagttcaattgaccaatttgaacaggttattgaggaaaataaatatgtttttgtattaaaacatagtgaaacttgtccaatatcggcaaatgcgtacgatcaatttaataaatttttatatgaacgcgatatggacggttattatttgattgtccaacaagaacgcgatttgtcagattatattgctaaaaaaacgaacgttaaacatgaatcacctcaagcattttattttgtaaatggtgaaatggtttggaatcgagaccacggtgatatcaatgtgtcgtcattagcacaagcagaagaataatgaaactatagggttggaacattttgccttacactactagacgtgaatagcacaacttaaattcgtgtgaatcagagtagtttggctataatgatgttctgaccttttattttatgtcacctttagaagcagttaagttagtacttttttacaaacatatgtataatatattcgagtatttttattgaaaatattttggaaaacgacgaatccaataagaaaatttaaacatgatttgtaagttagtttaataggaaatatatgctaaaccaaaagaagcatattgttatttactggaataattaataatcatgtcatgttaaatgttagcatataatcacgagataaaatctaaaatttaagattaatcttttatgaataaaaaacgtatcacaacaaataataaagtaaggtggtcaaggttatgaaagtattagtagccatggatgagtttcatggaattatttcaagttatcaagctaatagatatgttgaagaggcagttgcaagccaaattgaaactgcagatgtagttcaagtaccattgtttaatggaagacatgaattattagattctgtatttttatggcaatctgggcaaaagtatcgtataccagtacatgatgcagatatgaatgaagttgaaggtgtttacggacaaactgatacagggatgaccgttatcgaggggaatttatttttaaaaggtaaaaaaccaattgttgaacgaacaagttatggtttaggagaaatgattaaacatgcattagataacgacgcaaaacatgttgtaatttcactaggtgggattgatagttttgatgctggtgcaggtatgttacaagcattaggtgctcaattctatgatgacgaagggcgtgtcgtagatatgagacaaggtgctggtgtaattaaatatattcgtcgtatggatatgtcgaacttacaccctaaaatggaaacagcaagaattcaagtaatgtcggatttttcaagtcgattatatggtaagcaaagtgaaatcatgcaaacttatgatgcgcatcagttgaatcataatcaagcagcagaaatcgataatttaatttggtattttagtgagttatttaaaagtgaattgaaaattgcaattggtccagttgaacgtggtggtgctggtggtggaattgcagcagtcttgaatggactgtatcaagctgaaatattaaccagtcatgcattagtagaccaactaacacatttagaaaatttagttgaacaagcggatttaattatttttggagaaggattaaatgaaaatgatcagttgctagaaacgacaacattgcgtattgcagaactttgtcataaacatcaaaaggttgccattgcaatttgtgcaactgctgaaaagtttgatttatttgaatcacaaggggttacagcaatgtttaatacatttatcgatatgccagaaacttatactgactttaaaatggggttacaaattaggcattatacggttcagtctttaaaactgttgaaaacacattttaatgttgaggtttagtaaagaaggactaaattggtgatgctgtcatgatggttaataacatttatgatggttagcaaaacgaattagaagatcgaaagtatacgtaaaaaatatgaaaaatcacgctatcattgcactgaatgttagcgtgatttttatatattaattaagcctgagttgaactagtatataatcgttggtttttagtgattttcagcgatatcttctacaattccaatgattacttgtactgctttttccataacatcaatggatgcatattcatatgggccgtggaagttaccgcaacctgtaaagatgtttggagttggtaaccccataaatgacaattgtgaaccatctgtaccaccgcgaataggttcagtgtttgctggaatatctaatttggcaaagacacgtttaggtatatcaataatatgaggcaatggtaatattttttctgccatattgaaatattgatccgatatatcaactttaactggataattttcaaaatgggcattgatatcgtcacgtatttctaaaatacgtttcttacgcaattcgaattgttttttatcatgatcacgaataatgtattgcaaagttgctttttcaacagttccttcaaagttcattaagtgataaaagccttcgtatccttctgttcgctccggaacttcactatcaggtagcaaactatcgaattgttcacctaaacgtattgcgtttaccattgcatttttagctgaaccaggatgaacatttacaccgtggcatgtaataaccgcttcagcagcgttaaagctttcatattgtaattctccatattgactaccatccatagtataagcaaaatcagcattgaagcggtcaacatcaaatttatgtggaccacgaccgatttcttcgtctggtgtaaatccaatgcgaatggtaccatgtttaatttctggatgttcttgtaaataacaaatagcttccataatttccacaatacccgctttatcgtctgcacctagtaacgatgtaccatcagttaccattaatgtatgaccaactaaactgttaagttctggaaatactttaggatctaagacacgtttagtattgcctagtttgtatggcttaccatcatagttttcaataatttgcggtttaacatttgaagcattgaaatcaggtgatgtatcaacatgcgccaaaaatccaactgttgggacgtcgacatcgatgttactttctaatgtagcaaataagtagccattttcatctaaatcagttggcaatcctaattgttgtaattctttttctaataaatgtaacaaatcccattgcttttcagttgaaggtgttgttgtagattttggatcagattgcgtatcaattgtcgtatatcttgttaatctatctatcaattggttcttcattatattcgaccccttaaactctattattcatgttgtaagattttttatatgtcttacctttgattttaccatacagttgtttgatacgtgtgtataggtaatatagaatttcagaaactaatataccgaaagcaatcgcacctgaaatcagtgtaacttctaaaaatgtatttacagcacttgtataatcatttgatactaaaaaacgagtcgcttgataagctgcaccaccaggtactaatggtataatgcctggcactatgaatataattaccggtcgtttatatctgcgactcatagtatgactcattaagcctaaaattaagcttcccaaaaatgaagcgccaacttttccaaactctaaatctaccgttaattggtaaatcgtccatgcaatggcacccacaaatccacatgctactaagaggcgtttgggtgcattgaaaatgatagagaaaagtactgttgatataaagctgattgtaaaatgaaataaataaaatagcatgctttaacagtccttccttaaatgattaataaaacgattgcgacaccagcaccgattgcgaatgctgttaatgcagcttcaacaccgcgagacatacctgcaagtaattcacccgctaataaatctcgaatggcattggtaattaatataccagggacaagtggcatgacactggctatagtaatgatatcttgattggttgcaatgcctaatttagtaaatgtggctgcaatggatatgaccacagcggctgcaacaaactctgagaaaaatttaatttgtatatagcgttgcacaaagctgaatgttaaaaatgcggatccgccagcaatgactgcaatccaacaatctgatgcgacaccaccaaacataaataggaagaagccacatgcaatggcagctgcaaagaaattcgttaaaaaagaatattgtaatgatgcatgctgtaaatgaataaattcagatttagcttcatcaattgtgagttctttatttgatattttacgtgaaagactattcgttaaagcgattttctctaaatctgttgtacgctcttgtacacgaattaatcttgtacttgttcgatcgtttaatgaaaaaataattgcagttgaactgacaaaactatatgtattatgaagaccataactatgtgcgatacggttcattgtatcttcaactcgatatgtttcagcacctgattcaagtaaaattctacctgcaattaatacaacatcaatcactttgttttcatctataattgtgattgaatctggcatatcaattcacctccaatgatatgtgttatttatttgaacaattgaagtttacaacttgttgttacaactttcaatagtgagactttgtgttagtatgatgaacttgtatggttcaaatttaaataagaaaaactgttaatctttgctattatactatgatttaataatagcaaaggattaacagttttgtcgttgttataaattgataatagggttaaacattactttgtttcgcccttgatttttggctacatgcaccatatcgtctgcatctttaaacactttacgctgtgattttggatcgtcatctgttaaataaccaacaccgatagacactgacaatttaataacttctttgtttggtaaatggaatgatgatttttcaacacccgaacgaatattttcagctaatttaacactttgatcaagtgaataattgtgaatgacaactgagaactcttcgccaccatttctaaaaattttaaattgattcggcacatagtttttaagtaattgagacatttgttttaatacagcatcacctgatttgtgtgagtaggtatcattgacatctttaaatccatcgatatcgattaataataatgcgatactttgatgttctttttcagcttttcgtgaaatttcatttaaatgtctatcaaattcttttacattacctaagcctgttaagtaatcatatttatcttcgttttcataacgatttacgagtgagaagaaatgccaaatatcgacaaatgttatcgctgaagctaaagtgataattaatgaaattggtattaaaatgataacttccgatagtgtgtaaataggactcactaacgcgacaccaaataaaatgattattgtaacaacattaagtattaataatgatagcacatcattttgttttaaaaatggtccaatagcacttgttactgcagcaataacaatcaacgtaacaccgtacataatcgagttgttaaatactacaatttcaacaattgctacaattactgtggcagataatgtatagaccatatttgtaaatctacctaaaaacaataaaggaacgaatgttaagtgaattaaataatcttcacgataagggatagggtagacagataataataatgatacgattgtcattaaaacagtgacataagccttagaaaaaaccatacgtttgttttctgaatactgtaagcgatggaataaatagattccagcgactataacagatatattgtatataaatgcttcgaacatgtctgaatcgactcctttaattgaccactagctattgtaagtgaaaacttacaatttgtcattagtttacatataaaattaatgtatgatatagactttgatgttaaaatgttgccttaaatgatatgatgaaaaaatgaataataggcgatatataagaaatgaatcgtatagttgtaaatatgatatcattgattgaacgaattaatttataataaagctataagatatacgtagaaaatagatatatcattctataaagacaatattaaataaatataacgttaaaaacaattaatatcgatgaaggtgaataaatggttacattattactagttgcagtaacaatgattgtcagtttgacgataacaccaattgttattgcaatatcgaaaagattaaatttagttgataaaccaaattttagaaaagtacacactaaacctatttcagttatgggtggtacagtgattctcttttcatttttaataggtatttggattggtcatcctattgaaacagaaatcaaaccacttattattggtgcgattattatgtacgtacttgggcttgtagatgatatctacgatttgaaaccgtatataaaattggctggtcaaattgccgctgccttagtagttgctttttatggtgtgactattgattttatttcgttgccaatgggtacaacgattcattttggatttcttagtattccaattactgtgatttggattgttgctattacaaatgcaattaacttaattgatggactcgatggtttggcgtcgggtgtttctgcaatcggactcattacaatagggttcattgcaattttacaagctaatattttcataacgatgatttgttgtgttttattaggctctttaattgggtttttattttacaatttccatcctgccaaaatatttttaggtgatagtggggctttaatgattggatttatcatcggattcctttctttactcggattcaaaaatattacaattattgcattgttcttcccaattgttatcttagcagttccattcattgatactttgttcgcaatgattcgacgtgtgaaaaaagggcagcatataatgcaagctgataaatcgcatttgcatcataaactattagctttaggctacacacatagacaaacagtattattaatctattcaatctctattttatttagtctttcgagcattattttgtatgtatcgccaccattaggtgttgtattaatgtttgtattaatcatatttagtattgaattaattgttgaatttacaggattaatagataacaactaccgaccaatattaaatttaattagtcgtaagtcatctcataaagaggaatagggaatgaaagcatagctgtatgggataatttgtattatatggctttactctttacaatttttttgtattaaatttcaaatataaaaagcactgccataaacgtgtacttcaattgtcgtttaataatacgcaattgatatttaccgtcttatgatagtgctttttatttttattcagttggtatatcgaaaggtaactgctttggagtttcttcagtcaaatcgaaatttcctgcagtcatttgatttaaaaagttaataaacgcttcatagtcacttttaacgacatcgatatagtagcttaccttatcagtgtaagtttggtttcttaacataaaatgagttgaagctaattcatattcaaatttaccagtttgatcataattcagtgttactatacatggtactgcttctcgtagttcgacacgcccgatatcataaatgacgtctctaacagcaccgctataggcgcgaattaaaccgccaccacctaatttaataccaccaaaatatcttgttactacgacacacgcattatgaacatcgagcttttttaatatgtctaacattgggacaccggcagttcctgtcggttcaccatcatcattcgctttttgaatattcatttcaggtccaatagtatatgcagaacaattatgagtggcatctttatgttctttttttattgcagcaataaatgctttagcttcatcttcattttgaacaggtttgatatgagcaatgaatcttgatttactaatcacattttcaataatgtgttcttttttaacagtaatgatattttgtgtcataataactccttaattcataagcttaagattatttaatcttcattatacactgaaaatgacatgactataaatcgtttgattgccattttctttttaactgaaatattgtatcattgctatgagtatattttaggaggacgactatgaaaattgctgtgatgaccgattctacaagttatctgtcgcaggacttaatcgataaatataatattcaaatagcgccattaagtgtgacttttgaagatggcaagattataccagaagaaaaagttcgtactaaaaagcgtgccattcaaacattagaaaagaaagtattagatattgtaaaagactttgaagaagtaactttatttgtcataaatggagatcatttcgaagatggtcaagcgttatacaaaaagttacaagatgattgtccttcagcttatcaagtagcatactctgagtttggtccagttgttgcagcacatttaggttctggtggattaggtttaggctatgttggcagaaaaataagattaacataattataaaattttaataaaagagtctatattgtaattggaaattatctctcgtatacatggctttaaatgttcatcatttgaaagccaaaatgctaaagatataagaaaatcattataatattaggctcttttttacgttgaaatgaggttttaagcattaaacattacgggaaattaattcatcctcatacttcacttactaatgaaaaaattaaaaaagaagtaacaggtgtcatcaaacaaaattcaaactattattgtgttcaatgtgaaagtacaaatccaaagcatttttatcagtatgattcctcagtacattccaagaaaattgtatattgcagaaattgtatatcactgggtcgaatggataatgtaacaagatataaaataacagagagttcgcaaagttcatcacaagcatattatcatctctcatttgaattgtcggaacagcagtcttatgcctcagaacatattgttcgagccattagaaagagacaaacgattttgttatatgccgtaacaggtgcaggtaagacagaaatgatgtttcaaggcattcaatatgcaagaatacagggagataatatagctattgtgtcaccacgtgtagatgttgttgtagaaattagtaaacgtattaaagacgcatttcttaatgaagatatagacatactacaccagcaatcaagacaacaatttgaagggcattttgttgtatgcacagtgcatcaactttaccgattcaaacagcactttgatactatttttattgatgaagtcgatgcctttcctttatcaatggataaaaatttacaacaagcattgaagtcatcttctaaagttgaacatgcaacaatttatatgacagcaacaccaccgaaacaacttctgtcagagattccccacgaaaatataattaaattgccagctcgctttcataaaaaatcacttccagttcctaaatatcgttatttcaaacttaataataagaagattcagaaaatgttataccgaattttacaagatcaaattaataatcaacgttatacactggtgttttttaacaatatagaaacaatgattaaaacattttcggtttataagcagaaaattactaaattaacatacgtccatagcgaggatgtttttcgctttgaaaaagttgaacaattaaggaatggacatttcgatgtcatttttactacgacaatattagaacgtggatttacaatggcaaatttggatgttgttgttatcgatgcacatcaatatactcaagaggctttaatacaaattgctggacgtgttggacgaaaattagaatgtcctactggaaaagtattgttttttcatgaaggggtaagtatgaatatgattcaagctaaaaaagagattcaaaggatgaacaaattagcattaaaaagaggttggattgatgaataattgtttgagttgtggtgctaagttatatgaaaatataaccatttataatttgttcaagaaacctaatagattatgtgacagatgcaaagagaattgggacaatattaaacttgatattaaagcaaggcgatgttcaaggtgcttaaaacacttaaatcaagatgaagcgtattgtttagactgcaagtttctatcggcacactttaatttaatggaacaattatattgtcaatttcaatatgacggtttaatgaaagagatgatacatcagtataaatttttgaaagactattatttatgtgaattattggcacatttgattgaaataccacaaacatcttatgactatattgtgccaattccttcttcgccggcacatgatttatctagaacatttaacccggtagaagcagtactaaaagctaaagggattcgctttgataagattttaaagatgtcaaatagaccaaaacagtctcatttaactaagaaagagcgtctggcagatgaaaatccatttattattgatacggaattagatttaaatggtaaggaaatattactcgttgacgatatttatacaactggattaacaattcatcgtgcagggtgtaaattatatgctaaaaatatcagaaaattcaaagtgtttgcgtttgcacgatagcgtaaaaatgttaaaatataataaagagttaccaataaagaggtttaaggagagattactatgattagatttgaaattcatggagataacctcactatcacagatgctattcgcaactatattgaggaaaaaattggtaagttggaacgttattttaatgacgtaccaaatgcagtggcgcatgttaaagttaaaacttattcaaattcagctactaaaattgaagtaacaattccattgaaaaatgttacgttaagagctgaagagcgaaacgatgatttatacgcaggtattgatttaattaataataaacttgaaagacaagttcgaaaatataaaacacgtattaatcgtaagagccgtgatcgaggagatcaagaagtgtttgttgccgaattacaagaaatgcaagaaacacaagttgataatgacgcttacgatgataacgagatagaaattattcgttcaaaagaattcagcttaaaaccaatggattcagaagaagcggtattacaaatgaatctattaggtcatgacttctttgtattcacagacagagaaactgatggaacaagtatcgtttaccgccgtaaagacggtaaatatggcttgattcaaactagtgaacaataaattaagtttaaagcacttgtgtttttgcacaagtgcttttttatactccaaaagcaaattatgactatttcatagttcgataatgtaatttgttgaatgaaacatagtgactatgctaatgttaatggatgtatatatttgaatgttaagttaataatagtatgtcagtctattgtatagtccgagtcgaaaatcgtaaaatatttataatataatttattaggaagtataattgcgtattgagaatatatttattagtgataaacttgttgacaacagaatgtgaatgaagtatgtcataaatatatttatattgattctacaaatgagtaaataagtataattttctaactataaatgataagatatattgttgtaggccaaacagttttttagctaaaggagcgaacgaaatgggatttttatcaaaaattcttgatggcaataataaagaaattaaacagttaggtaaacttgctgataaagtaatcgctttagaagaaaaaacggcaattttaactgatgaagaaattcgtaataaaacgaaacaattccaaacagaattagctgacattgataatgtcaaaaagcaaaatgattatttagataaaattttaccagaagcatatgcacttgttagagaaggctctaaacgtgtattcaatatgacaccatataaagttcaaattatgggtggtattgcaattcataaaggtgatatcgctgagatgagaacaggtgaaggtaaaacattaacagcgacaatgccaacatacttaaatgcattagctggtagaggtgttcacgttattacagtcaatgaatacttatcaagtgttcaaagtgaagaaatggctgagttatataacttcttaggtttgactgtcggattaaacttaaacagtaagacgacagaagaaaaacgtgaagcatacgcacaagacattacttacagtactaataatgagctaggttttgattacttacgagataacatggtgaattattctgaagatagagtaatgcgtccattacattttgcaatcattgatgaggttgactcaattttaatcgacgaggcacgtacgccattaattatttctggtgaagctgaaaagtcaacgtcactttatacacaagcaaatgtttttgcgaaaatgttaaaacaggacgaagattataaatacgatgaaaaaacgaaagctgtacatttaacagaacaaggtgcggataaagctgaacgtatgttcaaagttgaaaacttatatgatgtacaaaatgttgatgttattagtcatatcaacacagctttacgtgcgcacgttacattacaacgtgacgtagactatatggttgttgatggcgaagtattaattgtcgatcaatttacaggacgtacaatgccaggccgtcgtttctcggaaggtttacaccaagctattgaagcgaaggaaggcgttcaaattcaaaatgaatctaaaactatggcgtctattacattccaaaactatttcagaatgtacaataaacttgcgggtatgacaggtacagctaaaactgaagaagaagaatttagaaatatttataacatgacagtaactcaaattccgacaaataaacctgtgcaacgtaacgataagtctgatttaatttacattagccaaaaaggtaaatttgatgcagtagtagaagatgttgttgaaaaacacaaggcagggcaaccagtgctattaggtactgttgcagttgagacttctgaatatatttcaaatttacttaaaaaacgtggtatccgtcatgatgtgttaaatgcgaaaaatcatgaacgtgaagctgaaattgttgcaggcgctggacaaaaaggtgccgttactattgccactaacatggctggtcgtggtacagatatcaaattaggtgaaggcgtagaggaattaggcggtttagcagtaataggtacagagcgacatgaatctcgtcgtattgatgaccagttacgtggtcgttctggacgtcaaggtgataaaggggatagtcgcttctatttatcattacaagatgaattaatgattcgttttggttctgaacgtttacagaaaatgatgagccgactaggtttagatgactctacaccaattgaatcaaaaatggtatcaagagctgtagaatcagcacaaaaacgtgtagaaggtaataacttcgacgcgcgtaaacgtatcttagaatacgatgaagtattacgtaaacaacgtgaaattatctataacgaaagaaatagtattattgatgaagaagacagctctcaagttgtagatgcaatgctacgttcaacgttacaacgtagtatcaattactatattaatacagcagatgacgagcctgaatatcaaccattcatcgactacattaatgacatcttcttacaagaaggtgacattacagaggatgatatcaaaggtaaagatgctgaagatattttcgaagtcgtttgggctaagattgaagcagcatatcaaagtcaaaaagatatcttagaagaacaaatgaatgagtttgagcgtatgattttacttcgttctattgatagccattggactgatcatatcgacacaatggatcaattacgtcaaggtattcacttacgttcttatgcacaacaaaatccattacgtgactatcaaaatgaaggtcatgaattatttgatatcatgatgcaaaatattgaagaagatacttgtaaattcattttaaaatctgtagtacaagttgaagataatattgaacgtgaaaaaacaacagagtttggtgaagcgaagcacgtttcagctgaagatggtaaagaaaaagtgaaaccgaaaccaatcgttaaaggcgatcaagttggtcgtaacgatgattgtccatgtggtagtggtaaaaaattcaaaaattgccatggaaaataaatgatataaaataactccttccaattaaacacctatagtttgtgttatgggaggagtctttttattttacaagcgttaaatactttaaaaaatgtgaagaagttgttaaacgttgttatgtacttagttttaaaaaatcggtttaggcatatgtcgatgataaatgtactgatttttaacaataaatgcataaactaattgtcagtgtgcttatatttcttaacattgttatttaacaaaattatgttaaaatttagcattataaaagatgcaaatcaatgacttgaattgaaatataaataggagcgaatgctatggaattatcagaaatcaaacgaaatatagataagtataatcaagatttaacacaaattagggggtctctttgacttagagaacaaagaaactaatattcaagaatatgaagaaatgatggcagaacctaatttttgggataaccaaacgaaagcgcaagatattatagataaaaataatgcgttaaaagcaatagttaatggttataaaacactacaagcagaagtagatgacatggatgctacttgggatttattacaagaagaatttgatgaagaaatgaaagaagacttagagcaagaggtcattaattttaaggctaaagtggatgaatacgaattgcaattattattagatgggcctcacgatgccaataacgcaattctagagttacatcctggtgcaggtggcacggagtctcaagattgggctaatatgctatttagaatgtatcaacgttattgtgagaagaaaggctttaaagttgaaactgttgattatctacctggggatgaagcggggattaaaagtgtaacattgctcatcaaagggcataatgcttatggttatttaaaagctgaaaaaggtgtacaccgactagtacgaatttctccatttgattcatcaggacgtcgtcatacatcatttgcatcatgcgacgttattccagattttaataatgatgaaatagagattgaaatcaatccggatgatattacagttgatacattcagagcttctggtgcaggtggtcagcatattaacaaaactgaatcggcaatacgaattacccaccacccctcaggtatagttgttaataaccaaaatgaacgttctcaaattaaaaaccgtgaagcagctatgaaaatgttaaagtctaaattatatcaattaaaattggaagagcaggcacgtgaaatggctgaaattcgtggcgaacaaaaagaaatcggctggggaagccaaattagatcatatgttttccatccatactcaatggtgaaagatcatcgtacgaacgaagaaacaggtaaggttgatgcagtgatggatggagacattggaccatttatcgaatcatatttaagacagacaatgtcgcacgattaatatatattttaaaaccgaggctctaaaagggcgtcggtttttggtttttttaaaggtagctaaataaattgtaaattagattttggaatatgatttgtttatgaatatttaagtacaattcggtagatagagttagaatatattttttaaaagttgtgtttgttaaaacaacatatgcagtgtgcatttagtaatattacctatggcgattttcaaggtattgaattaattattgaaaacgttctcaattacatggtatgaatacattttacactatgataaaaggttgtattctttttatattgttaaccatttgattacatcgttataacaatagcttttgacaaaatgtattgtgctatagtatttgcatacttaaaatactaacagcaaaggaatgacagcaagatgaaaaaatctcttacagtgacggtttcgtcagtgttagcttttttagctttaaataatgcagcacatgcacaacaacatggcacacaagtaaaaacacctgttcaacataattatgtatcaaatgttcaagcacaaacgcaatcaccgacaacttatacagtagttgctggcgattcattatataagattgctttagagcatcacttaacgttgaatcaattatattcatacaatcctggtgtaacacctttaatttttcctggtgacgtgatttcacttgtgcctcaaaataaagtgaaacaaactaaagcggttaaatcaccagtaagaaaagcaagccaagctaaaaaggtagtaaaacaacctgtacaacaagcatctaaaaaagtagtagttaagcaagcacctaagcaagcagtaactaagacagttaatgtagcatacaaacctgctcaagtacaaaaatcagtaccaactgtacctgttgcacataactacaataaatcagttgctaacagaggaaacttatatgcttatggaaactgcacatattatgctttcgatcgtcgtgcacaattaggtagaagtataggaagtttatggggcaatgcaaataactggaattacgcagcaaaagttgcaggatttaaagtagataaaacaccagaagttggcgctattttccaaacagctgctggtccatatggacatgttggtgttgttgaatctgtaaaccctaatggaacaattactgtttctgaaatgaactatgctggatttaatgttaaatcttcaagaacaattttaaatccaggaaaatataattacatccactaagtaatatatcaagacaagactatcctcttagcctgtttaagtaacaggttgagaggattttttggtatcatttaatcagagttatataaagaagatatttaaatgatatttaattgattgatatgtaaaaagaaagtataatttatgattaattaatggaggaggtaattgaaatgggtgtacatcaatattttaaaagattatcagatatggaaagacttataagattacctggaaaatttaaatattttgaacacaatgttgcagcacactcctttaaagtaactaaaattgcacaatatctagcaacagttgaagaatatcatggacgaaagattaattggaaaagcttatatgaaaaagcattaaatcatgatttcgccgaagtgtttactggtgatataaaaacacctgttaaatatgcgagtagtgaattaaaaaaattattttcgcaagttgaagaagaaatggtagagacctttattgaagaagaaattccattacaatatagagatgtttataagcaacgactgcaagaaggtaaagatgattcattagaaggccaaatactttcagttgctgataaaattgatttgctttatgaaacatttggagaaatacaaaaacgtaatcccgaagaattatttttcgaaatttatgaaatgagtctagaaacaattattcaatttgaccatttagcatctgtacaagattttattaataatatcattccagaaatgttgactgaaaactttatacctagaacagaattaagagaaacaaccatgaacattttaaataaaagaaaagaggaaaatgaatgatatggtattttagcgcagcattctttccatgtgtcttggtagtattatttagtgtaataacaagaagtaaatgggtcggtactattctgacattaattttaattggtgcctcaatctataaagagtatttccataacgagtggattatttttattgatgtagtgtcattattagctggttatttaattatagatcaactcgaatttcataaacatcaagatgaagatcgctaagattaactttaaaataatgtttcaaacaaatttgttgaaacaaaatgatgattaatataatgtgtatttacatactaaaaataacaagataaacgatttgatttaaggcaagcatagttagcacaactatgtttgtttttctttgttcgacatttttacgaacaaacgtttgctttttgtgtgactactttgctaaaatatgtaatgagaaagcaaagagttgagcggaaatataaataatacgttgaaagaggaggcatatgtgacaatggttgaacattatccttttaaaatacattctgattttgagcctcaaggtgaccaaccgcaagcaattaaagaaatcgtggaaggtattaaagcggggaaaagacatcaaactttattaggtgctactggcacagggaaaacatttacgatgagtaatgttattaaagaagttgggaaaccaacgttaattatcgcgcataacaaaacattagcaggacaattatatagtgagtttaaagaattttttcctgaaaacagggtggaatactttgtaagttactatgattattatcaaccagaggcatacgtaccgtctactgacacttttattgaaaaagatgcctcaatcaatgatgaaattgatcaactacgacattctgctacaagtgcattatttgaacgcgatgatgtaattattattgctagtgtaagttgtatatatggtttaggtaatcctgaagaatataaagatttagtagtaagtgttcgagttggtatggaaatggatagaagtgaattacttagaaaacttgtagatgtgcaatatacacgaaatgacatcgatttccaacgaggaacgtttcgagtgcgtggtgatgtagtggaaatattcccagcctctaaagaagaactttgtataagggttgagtttttcggcgatgagattgaccgtatccgagaagttaactacctaacaggtgaagtgttgaaagaaagagaacattttgcgatattcccagcttctcacttcgtaacacgtgaagaaaagttgaaagttgcgattgaacgtattgaaaaagaattggaagaacgattgaaagaattacgagatgagaataaattactagaagcgcaaaggttagaacagcgtaccaactatgatttagaaatgatgcgagagatgggattctgttcaggaattgaaaactattccgtacatttaactttgcgaccactgggttcgacaccatatactttattggattactttggcgatgattggttagggaaggtgcgaacaagtccctgatatgagatcatgtttgtcatctggagccatagaacagggttcatcatgagtcatcaacttaccttcgccgacagtgaattcagcagtaagcgccgtcagaccagaaaagagattttcttgtcccgcatggagcagattctgccatggcaaaacatggtggaagtcatcgagccgttttaccccaaggctggtaatggccggcgaccttatccgctggaaaccatgctacgcattcactgcatgcagcattggtacaacctgagcgatggcgcgatggaagatgctctgtacgaaatcgcctccatgcgtctgtttgcccggttatccctggatagcgccttgccggaccgcaccaccatcatgaatttccgccacctgctggagcagcatcaactggcccgccaattgttcaagaccatcaatcgctggctggccgaagcaggcgtcatgatgactcaaggcaccttggtcgatgccaccatcattgaggcacccagctcgaccaagaacaaagagcagcaacgcgatccggagatgcatcagaccaagaaaggcaatcagtggcactttggcatgaaggcccacattggtgtcgatgccaagagtggcctgacccacagcctggtcaccaccgcggccaacgagcatgacctcaatcagctgggtaatctgctgcatggagaggagcaatttgtctcagccgatgccggctaccaaggggcgccacagcgcgaggagctggccgaggtggatgtggactggctgatcgccgagcgccccggcaaggtaagaaccttgaaacagcatccacgcaagaacaaaacggccatcaacatcgaatacatgaaagccagcatccgggccagggtggagcacccatttcgcatcatcaagcgacagttcggcttcgtgaaagccagatacaaggggttgctgaaaaacgataaccaactggcgatgttattcacgctggccaacctgtttcgggcggaccaaatgatacgtcagtgggagagatctcactaaaaactggggataacgccttaaatggcgaagaaacggtctaaataggctgattcaaggcatttacgggagaaaaaatcggctcaaacatgaagaaatgaaatgactgagtcagccgagaagaatttccccgcttattcgcaccttccttagtaatgattgatgaatcacatgtgacattaccgcaagttcgaggcatgtataacggagacagagcgcgtaaacaagttttggtggatcatgggtttagattaccgagtgcattagataaccgtccacttaaatttgaagaatttgaagaaaagacaaaacaacttgtgtatgtatctgcaacgcctggaccatacgaaattgaacatacggataagatggttgaacaaattattcgtcctactggtttactggatcctaagattgaggttagacctactgaaaatcaaattgacgatttattaagtgaaattcaaacaagagttgagcgtaatgaacgcgtacttgttacaacgctcactaaaaagatgagtgaagatttaaccacatacatgaaagaagcgggtattaaagttaattatctgcattcagaaatcaagacattagaacgaattgaaataattagagacttacgaatgggtacatatgatgttatcgtaggtattaatttattaagagagggtattgatataccagaagtttctctagttgtcatattagatgcagataaagaagggtttttacgttctaaccgctcattaattcaaacaataggtagagctgcgcgtaacgataaaggtgaagtcattatgtatgccgataaaatgactgattcgatgaagtatgcaattgatgagacacaacgtcgtcgagaaatacagatgaaacataatgaaaaacatggtattacacctaaaacaattaataaaaaaatacatgatttaattagtgctactgttgaaaatgacgaaaataatgacaaagcacaaactgtgatacctaagaagatgacgaaaaaagaacgtcaaaagacaatcgacaatatagaaaaagaaatgaaacaagcagcgaaagatttagatttcgagaaagctacagaattaagagatatgttatttgaattaaaagcagaagggtgacaagtaaatgaaagaaccatccatagtagtaaaaggtgctcgtgcgcataacttgaaagatattgatatcgaactacctaaaaataaattaattgttatgacaggtttatctgggtcaggtaaatcgtcattagcattcgatactatatatgctgaaggacaacgacgttatgttgaatcattaagtgcctatgcgcgtcaatttttaggccaaatggacaaaccagatgttgatacaattgaaggattatcgccagcaatttcaatagatcaaaaaacaacaagtaaaaatccaagatcaactgtagcaacagtaacagaaatatatgattatatacgtttgttatatgcacgtgttggtaaaccttactgtccaaatcacaatatagaaattgaatcgcaaacagtacaacaaatggttgaccgcattatggaattagaggcacgtacaaagattcaattattagcacctgtcatcgctcatcgtaaaggtagtcatgaaaagctaatcgaagatattggtaaaaaaggttatgtacgtttaagaatcgatggcgaaattgttgatgtaaatgatgtacctactttagataagaacaagaatcatacaatagaagttgttgtagaccgattagttgttaaagatggaattgaaacacgactagctgactctatagaaactgccttagagctttcagaaggacaattaacagtcgatgtcattgacggggaagaccttaagttttcagaaagccatgcttgtcctatatgtggattttcaatcggagagttagaaccaagaatgtttagctttaacagtccttttggtgcttgtccgacatgtgatggcttaggccaaaagttaacagtcgatgtagacttggttgttcccgacaaagataagacgctaaacgaaggtgcaatagaaccttggataccgacgagttctgatttttatccaacattgttaaaacgtgtttgtgaagtttataaaatcaatatggataaaccttttaaaaagttaacagaacgtcaacgtgatattttattgtatggttctggtgacaaagaaattgaatttacatttacacaacgtcaaggtggtactagaaaacgaacaatggttttcgagggtgtagttcctaatataagtagacgattccatgaatctccttcagaatatacacgtgaaatgatgagtaaatatatgactgaactaccttgcgaaacttgtcatggaaagcgattgagtcgtgaagcgttatctgtttatgtaggtggtttaaatattggtgaagtagtcgaatattcaatcagtcaagcgctgaactattataaaaacattgatttgtcagaacaagatcaagcgattgcaaatcaaatattgaaagaaattatttcccgactcacttttttaaataatgtgggacttgaatatttaacgttaaacagagcttcaggtacactttcaggtggtgaagcacaacgtattcgattagcaacgcaaattgggtcgcgtttgactggtgtcttatatgtattagatgagccatcaattggactgcatcaaagagataatgatcgattaattaatacacttaaagaaatgagagatttaggaaatactttaattgtagttgaacacgatgatgatacaatgcgtgcggctgattacttagtggatataggtcctggtgctggtgaacatggagggcagattgtgtctagtggtactcctcaaaaggtaatgaaagataaaaaatcattaacaggacaatacttgagtggtaagaaacgtattgaagtacctgaatatcgcagaccggcttcagatcgtaaaatttctatacgtggagctagaagcaacaatcttaaaggggttgatgtggacataccactatcaatcatgacggttgttacaggtgtatcaggttctggtaaaagctcattagtaaatgaagtattatacaaatcattagctcaaaaaattaataaatctaaagtaaagccaggattgtacgataagattgaaggtattgatcaacttgataaaattattgatattgatcaatcaccaataggtagaacgccacgctctaatccagcaacatatactggtgtgtttgatgatatacgtgatgtgtttgcgcaaacaaatgaagctaaaattcgaggatatcaaaaagggcgttttagttttaatgtaaaaggtggacgctgtgaagcttgtaaaggtgacggtattattaaaattgaaatgcattttttacctgatgtttatgttccttgtgaagtgtgtgatggtaaacgatataatcgtgagacactagaggttacttacaaaggtaaaaatattgctgacattttagaaatgactgttgaagaagcaacacaattttttgaaaatattcctaagattaagcgcaagttacaaacactagttgatgttggtcttggatacgtcacattaggtcaacaagctacaacgttatcaggtggtgaggctcaacgtgtgaaacttgcatctgaacttcataaacgttcaactggtaaatctatttatatcctagatgaaccgacaacagggttacatgttgacgatattagtagattattaaaagtattaaaccgattagttgaaaatggtgatactgttgtaattattgaacataacctagatgttatcaaaacagcagactatattatagacttaggtcctgaaggtggtagtggcggtggtactattgttgcgactggcacacccgaagatattgctcagacaaagtcatcatatacaggaaagtatttaaaagaagtacttgaacgagataaacaaaatactgaagataaataagattaaaagaagtgaaggatgttataaatttatccttcgcttctttttattaatttagtaatgaatagtagaaagaaaagatgcgtaaaaagaattatgttaagatagggtcaatctagagtagttaaacataaatcgaactgggagtgggacagaaatgataaagaatcactaatgatttattatgtagtggttctttgtcattagccacagctattgtgtacttaaaaataggaatgcatgagtgcaactcatgcataagaaatactaatttctaaagaaaaagtatttctttatgttggggccccgccaacttgcattgtttgtagaatttcttttcgaaattctttatgttggggccccgccaacttgcattgtttgtagaatttcttttcgaaattctttatgttggggccccgccaactaattccaatatatcattgtagagcttaggtcattgatttttggctcggacttttatggcgatatgaaccatgtaaattaagcaagcaataaattaatgattgatattgacttgtaaaataataacaataatgaacaattaatatttattttagcttttcaatgtagattggtgttatatttttgatatgataagaagagatgtaagagtagggataaatacaattgaggtgaacccatgttaacgacagaaaaactagttgaaacattaaagttagatttaatcgctggtgaagaaggactatcgaagccaattaaaaatgctgatatatcaagaccgggcttagagatggcaggttatttttcacattatgcgtcagatagaatacaactattaggaacaacggaactatcgttttacaatttattaccagataaggatcgcgcaggtcgtatgcgtaaactatgcagaccagaaacgcctgcaattattgtgacacgtggattgcagccaccagaagaattagttgaagctgcaaaagaattaaataccccacttatagttgctaaagatgcgactacaagtttaatgagtcgcttaacaacgtttttagagcatgcacttgcaaagacgacatctttacatggtgttttagtagatgtttacggtgttggtgtactaattaccggtgattcaggaataggtaaaagtgagactgcgttggaattagttaaacgtgggcatagattagtagcagatgataatgtagaaatacgtcaaattaataaagatgaactaatagggaaaccaccaaagttaatagaacatctattagaaatacgtggactaggtattatcaatgttatgactttatttggcgcgggttcaatattaactgaaaaacgaattagattaaatattaatttggaaaactggaacaagcaaaagttatatgaccgcgtaggtcttaatgaagagacgctaagtattttagatactgaaatcactaaaaaaacaatacctgtaagacctggtagaaatgttgcggtaattattgaggtcgctgcaatgaactatcgattaaatatcatgggcattaacacggccgaagaatttagtgaaagattaaatgaagaaattatcaagaacagtcataagagtgaggagtaggttgaatgggtattgtatttaactatatagatcctgtggcatttaacttaggaccactgagtgtacgatggtatggaattatcattgctgtcggaatattacttggttactttgttgcacaacgtgcactagttaaagcaggattacataaagatactttagtagatattattttttatagtgcactatttggatttatcgcggcacgaatctattttgtgattttccaatggccatattacgcggaaaatccaagtgaaattattaaaatatggcatggtggaatagcaatacatggtggtttaataggtggctttattgctggtgttattgtatgtaaagtgaaaaatttaaacccatttcaaattggtgatatcgttgcgccaagtataattttagcgcaaggaattggacgctggggtaactttatgaatcacgaggcacatggtggatcggtgtcacgcgcttttttagaacaattacatttgcctaattttataatagaaaatatgtatattaacggccaatattatcatccaacattcttatatgaatccatttgggatgtcgctggatttattatcttagttaatattcgtaaacatttaaaattaggagaaacattctttttatatttaacttggtattcaattggtcgattctttatagaaggattacgtacagatagcttaatgctcacaagtaatattagagttgcacaattagtatcaattcttttaattttaataagtataagtttaattgtatatagaaggattaagtataatccaccgttgtatagcaaagttggggcgcttccatggccaacaaaaaaagtgaagtagtgatagtttgaggaaatttttatcaaaaacacatcatcatacaaaccctttatggcgtgtataccgtcttgttaaattttcgaaagtttttaagaatgtaattatcattgaattttcgaaatttattccaagtatggtactgaaaagacatatatataaacaacttttaaatattaatatcggtaatcaatcgtcgatagcttataaagtaatgttagatattttttacccagaactgattacgattggtagtaacagtgttattggttacaatgtaacaattttgacgcatgaagcattagttgatgaatttcgttatggaccagtgacgataggatctaacactttgattggtgcaaatgctaccattttacccggtataacgattggtgacaatgtaaaagttgcagctggtacggttgtttcaaaagatataccggataatggatttgcatatggcaaccctatgtatataaaaatgattaggaggtgacaattttatggcgcaaaagaataataatgtaattccaatgacttttgatgatgcattttatcgtaaaatggctaaacagaagtttaaacaaagagaatataaacgagctgctgaatactttgaaaaagtgttagaattgtcacctgatgatctggaaattcaaattgattatgcacaatgtctagtgcaacttggtattgctaaaaaagcagaacatttattttatgacaatattatttataataggcatctagaagatagcttttatgaattgagtcagctcaacattgaagttaacgaaccaaacaaggcattcttgtttggtattaattatgttattgttagcgacgaccaagattatagagatgaattagatcaaatgtttgatgtgaaatatcaaagtgaagaacaaattgaacttgaagctcaattgtttgtagttcaaatactattccaatatcttttttctcaaggtcgattaaaagatgcaaagaattatgtcttacatcaaccacaagaagttcaagatcatcgtgtagtacgtaatttattggcaatgtgttatttatatctcggtgaatatgatacggctaaagcattgtacgaagcactattacaagaggatagtacagatatatatgcattatgccattatactttgctactttataacactaaggaaaatgaacaatatcaaaaatatttaaaaatattaaacaaagttgtacctatgaatgacgatgaaagttttaaattaggtattgtattaagttatttaaagcagtatcgtgcatcacaacaattgttgtaccctttatataaaaaagggaaatttttatcaattcaaatgtacaatgctttagcatataattattattatttaggtgaagaagacgaaagtcattactactgggataaattgaagcaaatttctaaagtggaaattggacatgcgccttgggtaattgaaaatagcaaagaagtttttgaccaacatattttgccattacttcaaagtgatgacagtcattatcgtttatatggtatttttttattggatcaattaaatggtaaagaaattgtgatgacggaaagtatttggcaggttttggaaaatctaaataattatgagaaattgtatttaacgtatttagttcaaggtttaacgctcaataaattagacttcattcatcgcggcttattaacgctttaccataatgaattatttgtaagtgaaaatgatgtaatggttgcatggattaatcaaggtgaactcataattgctgaaaaagtagatttaactgatgttgagccatatatcggtgcgtttatttatttgtattttaaaaatcaacctcgaaacgttacaaagaagcaaattacaacatggttaggcataacacaatataaactgaacaaaatgattgaatttctcttgagcatatagatttatgaaaagttagatttattatataatgcgcataatgattaataatgaggaggcgttaataaaatgactgaaatagattttgatatagcaattatcggtgcaggtccagctggtatgactgctgcagtatacgcatcacgtgctaatttaaaaacagttatgattgaaagaggtattccaggcggtcaaatggctaatacagaagaagtagagaacttccctggtttcgaaatgattacaggtccagatttatctacaaaaatgtttgaacacgctaaaaagtttggtgcagtttatcaatatggagatattaaatctgtagaagataaaggcgaatataaagtgattaactttggtaataaagaattaacagcgaaagcggttattattgctacaggtgcagaatacaagaaaattggtgttccgggtgaacaagaacttggtggacgcggtgtaagttattgtgcagtatgtgatggtgcattctttaaaaataaacgcctattcgttatcggtggtggtgattcagcagtagaagagggaacattcttaactaaatttgctgacaaagtaacaatcgttcaccgtcgtgatgagttacgtgcacagcgtattttacaagatagagcattcaaaaatgataaaatcgactttatttggagtcatactttgaaatcaattaatgaaaaagacggcaaagtgggttctgtgacattaacgtctacaaaagatggttcagaagaaacacacgaggctgatggtgtattcatctatattggtatgaaaccattaacagcgccatttaaagacttaggtattacaaatgatgttggttatattgtaacaaaagatgatatgacaacatcagtaccaggtatttttgcagcaggagatgttcgcgacaaaggtttacgccaaattgtcactgctactggcgatggtagtattgcagcgcaaagtgcagcggaatatattgaacatttaaacgatcaagcttaattcgaagtcgaattaagatgttgagctgtaaattatttggatatttattttaatagtgtcatcacagcgttaaaataatgtcttacttttaaattaaagcaaattatatagaaaactagaacttagtacgtatcatttgtgcgtttcaatgagttctagtttttttatatgttatattaaacttataactttatgggagtgggacagaaatgataaagagccactaatgatttattatgtagtggttcttaaacattagccacagctaatgtgtacttaaaaataggaatacatgagtaaaactcatgcataagaaatactaatttctatagaaaaagtattactttatcgttgtcccaccccaacttgcacattattgtaagctgactttccgccagcttctgtgttggggccccgccaacttgcacattattgtaagctgacttttcgtcagcttctgtgttggggccccgccaacttgcacattattgtaagctgacttttcgtcagcttctgtgttggggccccgccaacttgcattgtctgtagaaattgggaatccaatttctctatgttggggcccacaccccaactcgcattgcctgtagaatttcttttcgaaattctctgtgttggggcccacaccccaactcgcattgcctgtagaatttcttttcgaaattctctgtgttggggcccacaccccaactcgcattgcctgtagaatttcttttcgaaattctctgtgttggggcccctgactagagttgaaaaaagcttgttgcaagcgcattttcattcagtcaactactagcaatataatattatagaccctaggacattgatttatgtcccaagctccttttaaatgatgtatatttttagaaatttaatctagacatagttggaaataaatataaaacatcgttgcttaattttgtcatagaacatttaaattaacatcatgaaattcgttttggcggtgaaaaaataatggataataatgaaaaagaaaaaagtaaaagtgaactattagttgtaacaggtttatctggcgcaggtaaatctttggttattcaatgtttagaagacatgggatatttttgtgtagataatctaccaccagtgttattgcctaaatttgtagagttgatggaacaaggaaatccatccttaagaaaagtggcaattgcaattgatttaagaggtaaggaactatttaattcattagttgcagtagtggataaagtcaaaagtgaaagtgacgtcatcattgatgttatgtttttagaagcaagtactgaaaaattaatttcaagatataaggaaacgcgtcgtgcacatcctttgatggaacaaggtaaaagatcgttaatcaatgcaattaatgatgagcgagagcatttgtctcaaattagaagtatagctaattttgttatagatactacaaagttatcacctaaagaattaaaagaacgcattcgtcgatactatgaagatgaagagtttgaaacttttacaattaatgtcacaagtttcggttttaaacatgggattcagatggatgcagatttagtatttgatgtacgatttttaccaaatccatattatgtagtagatttaagacctttaacaggattagataaagacgtttataattatgttatgaaatggaaagagacggagattttctttgaaaaattaactgatttgttagattttatgatacccgggtataaaaaagaagggaaatctcaattagtaattgccatcggttgtacgggtggacaacatcgatctgtagcattagcagaacgactaggtaattatctaaatgaagtatttgaatataatgtttatgtgcatcatagggacgcacatattgaaagtggcgagaaaaaatgagacaaataaaagttgtacttatcggtggtggcactggcttatcagttatggctaggggattaagagaattcccaattgatattacggcgattgtaacagttgctgataatggtgggagtacagggaaaatcagagatgaaatggatataccagcaccaggagacatcagaaatgtgattgcagctttaagtgattctgagtcagttttaagccaactttttcagtatcgctttgaagaaaatcaaattagcggtcactcattaggtaatttattaatcgcaggtatgactaatattacgaatgatttcggacatgccattaaagcattaagtaaaattttaaatattaaaggtagagtcattccatctacaaatacaagtgtgcaattaaatgctgttatggaagatggagaaattgtttttggagaaacaaatattcctaaaaaacataaaaaaattgatcgtgtgtttttagaacctaacgatgtgcaaccaatggaagaagcaatcgatgctttaagggaagcagatttaatcgttcttggaccagggtcattatatacgagcgttatttctaacttatgtgtgaatggtatttcagatgcgttaattcattctgatgcgcctaagctatatgtttctaatgtgatgacgcaacctggggaaacagatggttatagcgtgaaagatcatatcgatgcgattcatagacaagctggacaaccgtttattgattatgtcatttgtagtacacaaactttcaatgctcaagttttgaaaaaatatgaagaaaaacattctaaaccagttgaagttaataaggctgaacttgaaaaagaaagcataaatgtaaaaacatcttcaaatttagttgaaatttctgaaaatcatttagtaagacataatactaaagtgttatcgacaatgatttatgacatagctttagaattaattagtactattcctttcgtaccaagtgataaacgtaaataatatagaacgtaatcatattatgatatgataatagagctgtgaaaaaaatgaaaatagacagtggttctaaggtgaatcatgttttaaataagaaaggaatgactgtacgatgagctttgcatcagaaatgaaaaatgaattaactagaatagacgtcgatgaaatgaatgcaaaagcagagctcagtgcactgattcgaatgaatggtgcacttagtctttcaaatcaacaatttgttataaatgttcaaacggaaaatgcaacaacggcaagacgtatttattcgttgattaaacgtgtctttaatgtggaagttgaaatattagtccgtaaaaaaatgaaacttaaaaaaaataatatttatatttgtcgtacaaagatgaaagcgaaagaaattcttgatgaattaggaattttaaaagacggcatttttacgcatgaaattgatcattcaatgattcaagatgacgaaatgagacgcagttacttgagaggagcttttctggcaggtggctcagtgaataaccctgaaacatcttcgtaccatttggaaattttttctcaaaatgagagtcatgcagaaggcttaacgaaactaatgaatagttatgagttgaatgccaaacatttagagcgaaaaaaaggaagtattacgtatttaaaagaagcggaaaagatttcggattttcttagtttgataggtggctatcaagcgttattaaaatttgaagacgtacgtattgtaagagatatgcgtaattctgttaaccgactcgttaattgtgaaacggccaatctaaataaaacagttagtgctgcgatgaaacaagttgagagcattaaattgattgataaagaaattggtattgaaaatttaccagacaggttgagagagattgctagaattcgagtagaacatcaagaaatttcgttgaaagagcttggagaaatggtatcaactggtccaatttcaaaatcaggtgtaaatcaccgattaagaaaactgaatgatttagccgataagattagaaatggtgaacaaatagaattataagtaagaaggtgtttttggtagtgaattatcaaaaacacttttttatgattaaaaagtgtttaatgaataatagtcgactaactattaaattgagctggaaagtttaatgaaggaaattcaataaccaagtgatgcctaattttctcattaaatagcatcatatgtatcaatttggtcataagaaaatatgaatgtgataattaattgagtccctgaaagtccctgatcatagacaaaaacaaaatcagcataaataagaatcccgacattgcgggattctctgtattgaaaagtattgtattttattaaaacagcctccttgaagggaattgaacccctatcttaagaaccggaatcttacgtgttatccattacaccacaaggagcaaatatgtaatcatatctctgtactatgagaagtaaaataagtacaatctaaaatagatattatcagtttacaaaggaaagagaaaagcgtcaaacaatgtaactatttaaagtcaaagtgtttgaccaaatttgacttaatatgtaaaataatgagtaacagttattacaaggaggaaatatagatgaatttaattcctacagttattgaaacaacaaaccgcggtgaacgtgcatatgatatatactcacgtttattaaaagaccgtattattatgttaggttcacaaattgatgacaacgtagcaaattcaatcgtatcacagttattattcttacaagcgcaagactcagagaaagatatttatttatacattaattcaccaggtggaagtgtaacagctggttttgcgatttatgatacaattcaacacattaaacctgatgttcaaacaatttgtatcggtatggctgcatcaatgggatcattcttattagcagctggtgcaaaaggtaaacgtttcgcgttaccaaatgcagaagtaatgattcaccaaccattaggtggtgctcaaggacaagcaactgaaatcgaaattgctgcaaatcacattttaaaaacacgtgaaaaattaaaccgcattttatcagagcgtactggtcaaagtattgaaaaaatacaaaaagacacagatcgtgataacttcttaactgcagaagaagctaaagaatatggcttaattgatgaagtgatggtacctgaaacaaaataattcaaagtaaagagtagactaagctgtctgctctttttgtatgagtaaaccaaggtgtcaataatttgtttactatactttgagcggaaatatgattgaatgaagctagttgaaccgtaactatatgaaatgttcccttcaaagtagacattgaaaggaacatttcaatcctttgtttgtaagtcgctctagacattacatttagtacatatgttgtttctaatgctcattaatggtattgattattctttaattaaatcttcaagtgccatttttaaattactatatttaaattggaatcccaatgcttgaattttattaggtaatactttttgagtatccaatactactgttgacatttgaccaagtatgagacgcattgcaagacttggtgcccaagtttcatgaggcttatgcatagctcttgctaaagtgtagccaaataaattttgacgttcaggtataggtgcagttaaattaaacggaccactagctgactcgttatttattaaaaataaaatagcttgaattaaatcattgatatgaatccatgaataccattgttgaccagaacctaatttaccaccaatgtaatattcgtatggtagtttcattgtttgtaacgcaccgccttcattcgataaaattataccgaaacgaccgatgacaactcgtgtacctaattgttcaaattgttgtgcgaaacgttcccattgatacacaatatctgataagaaatcaaaaggtaaagttttataaacttctgtgtaactcataaataaatcaggaggatagtaaccagtggcactagcattaaataaagctttaggtgctttattacgtgatttaaacaattcatataaagcttgcgtagattgaattctacttagcattagcgtttgtttatattccggtgtccatcgtttattcaatgtagcacctgctaagttgatgaccacatcgatattttgaggaactttgtgttcccacccagatttagcccagttgacatatgaaattttcttatcatttgaaatttggtcgtgtcgcgttaatatcgtgatatgtgaatctgattttttaatttcattaactaattgagatccaaccataccagtcccaccagtaattaagtattgtttcattatcattcaccccatgtaattttgtatttagttactatttaataatcattattgttgttcaaaggttatacattatttagacaataatatgtcaataactttttttgaattgtattttaataaaaatgatataagttataataaaggtgtaccttcgataacgaataaacatctcttaaaagtatgtgtaaaacgctgcatgatacaaacgaaggtaaaaatttgactccctttagtagtggacccgtacgttaatcgtgcgggtcgtttttatttatttcttattcccattatacatcaatttaaagcattaattttttaaacaaatttaagaatacatagtaatataacaatctaaacataaaaacttttaacacaacacttaaaccaatgctttaattttcaatacgtagctataatttgttgtaaaatcaaaaaggttaaaatgttaattttcaaaaaaaggctcaaaatatgtttgatttagttattaaatgttaagatatataagactactatttctttgtaaaaatgaatccgatttacgagtgagtaatagtgaaggcagttttaagttgaagaaggcaaaaagagtaaatgtttattaatatttgtagaaactaggtaagcaaattagttgtgaaaatgttaatggttgcgtgataatttctatatttaaattagtttgaagtgagggagagtatgtcgaatcaaaattacgactacaataaaaatgaagatggaagtaagaagaaaatgagtacaacagcgaaagtagttagcattgcgacggtattgctattactcggaggattagtatttgcaatttttgcatatgtagatcattcgaataaagctaaagaacgtatgttgaacgaacaaaagcaggaacaaaaagaaaagcgtcaaaaagaaaatgcagaaaaagagagaaagaaaaagcaacaagaggaaaaagagcagaatgagctagattcacaagcaaaccaatatcagcaattgccacagcagaatcaatatcaatatgtgccacctcagcaacaagcacctacaaagcaacgtcctgctaaagaagagaatgatgataaagcatcaaaggatgagtcgaaagataaggatgacaaagcatctcaagataaatcagatgataatcagaagaaaactgatgataataaacaaccagctcagcctaaaccacagccgcaacaaccaacaccaaagccaaataataatcaacaaaacaatcaatcaaatcagcaagcaaaaccacaagcaccacaacaaaatagccaatcaacaacaaataaacaaaataatgctaatgataagtagtatttagtcaaacaaaaatgaaccagtatgacagacaacacaattaattaggttgtctcgaatattggttcttatttttataattgttaattaggggagagatgatacttaaatagttagttgtttattttacggatagtgaaatttattttgagtgaggtgggacagaaatgatatttttgcaaaatttatttcgtcgtcccaccccaactcgcattgcctgtagaatttcatttcgaaattctctatgttggggcccctgactttaattgaaaaaagcttgttacaagtgcattttcgttcggttaactactactaatgtgactttttggattctagagcattgatttatgtcctagtctcaaataataagcaaatgattatcgagtcagtataagggtatacatttgactacagcgaataaaataaaacgttttgttgaataacaaatcgaaaatatattgcaagcgctttatcaaattatttagaaaatttaagttttatgcttgcaatttttgaaatagaatagtactattgcaagtgtaaagaggttaatttttgtcccacgcgggacttaaaaaggcaaccactggttgtgacatatccttatttacatttataaatataaggaggaggtagtagtgaaagacttattgcaagcacagcaaaagcttataccggatctcatagataaaatgtataaacgtttttctattcttactactatctcaaaaaatcagcctgtcggacgtcgaagtttaagcgaacatatggatatgactgaacgtgtactgcgttctgaaacagatatgcttaagaaacaagatttgataaaagttaagcctaccggaatggaaattacagctgaaggtgagcaactgatttcgcaattgaaaggttactttgatatctatgcagatgataatcgtctgtcagaaggtattaagaataaatttcaaattaaggaagttcatgttgttcctggtgatgctgataatagtcaatctgttaaaacagaattaggtagacaagcaggtcaattacttgaaggcatattacaagaagacgcgatagttgctgtaactggcggatccacgatggcatgtgttagtgaagcaattcatttattaccatataatgtattcttcgtaccagccagaggtggactaggcgaaaatgttgtctttcaggcaaacacaattgcagccagtatggcacaacaagctggcggttattatacgacgatgtatgtacctgataatgtcagtgaaacaacatataatacattgttgttagagccatcagtcataaacactttagacaaaattaaacaagcaaacgttatattacacggcattggtgatgcgctgaagatggcgcatcgacgtcaatcacctgaaaaggtcattgaacaacttcaacatcatcaagctgtcggagaggcatttggttattattttgatacacaaggtcaaattgtccataaggttaaaacaattggacttcaattagaagaccttgaatcaaaagactttatttttgcagttgcaggaggcaaatcgaaaggtgaagcaattaaagcatacttgacgattgcacccaagaatacagtgttaatcactgatgaagccgcagcaaagataatacttgaataagagataaaaagtttaatactttttaaatatcattttaaaggaggccattataatggcagtaaaagtagcaattaatggttttggtagaattggtcgtttagcattcagaagaattcaagaagtagaaggtcttgaagttgtagcagtaaacgacttaacagatgacgacatgttagcgcatttattaaaatatgacactatgcaaggtcgtttcacaggtgaagtagaggtagttgatggtggtttccgcgtaaatggtaaagaagttaaatcattcagtgaaccagatgcaagcaaattaccttggaaagacttaaatatcgatgtagtattagaatgtactggtttctacactgataaagataaagcacaagctcatattgaagcaggcgctaaaaaagtattaatctcagcaccagctactggtgacttaaaaacaatcgtattcaacactaaccaccaagagttagacggttctgaaacagttgtttcaggtgcttcatgtactacaaactcattagcaccagttgctaaagttttaaacgatgactttggtttagttgaaggtttaatgactacaattcacgcttacacaggtgatcaaaatacacaagacgcacctcacagaaaaggtgacaaacgtcgtgctcgtgcagcggcagaaaacatcatccctaactcaacaggtgctgctaaagctatcggtaaagttattcctgaaatcgatggtaaattagatggtggtgcacaacgtgttcctgtagctacaggttcattaactgaattaacagtagtattagaaaaacaagacgtaacagttgaacaagttaacgaagctatgaaaaatgcttcaaacgaatcattcggttacactgaagacgaaatcgtttcttcagacgttgtaggtatgacttacggttcattattcgacgctacacaaactcgtgtaatgtcagttggcgaccgtcaattagttaaagttgcagcttggtatgataacgaaatgtcatatactgcacaattagttcgtacattagcatacttagctgaactttctaaataattttagtatagtttttattcaaatacgctagtgctcagaactatttagcattaattaaagcttatgagtaagcggggagcacaaacgcttctccgcttatttttatataaaatttcctaattacaaggaggaaacaccatggctaaaaaaattgtttctgatttagatcttaaaggtaaaacagtcctagtacgtgctgattttaacgtacctttaaaagacggtgaaattactaatgacaaccgtatcgttcaagctttacctacaattcaatacatcatcgaacaaggtggtaaaatcgtactattttcacatttaggtaaagtgaaagaagaaagtgataaagcaaaattaactttacgtccagttgctgaagacttatctaagaaattagataaagaagttgttttcgtaccagaaacacgcggcgaaaaacttgaagctgctattaaagaccttaaagaaggcgacgtattattagttgaaaatacacgttatgaagatttagacggtaaaaaagaatctaaaaatgatccagaattaggtaaatactgggcatctttaggtgatgtgtttgtaaatgatgcttttggtactgcgcatcgtgagcatgcatctaatgttggtatttctacacatttagaaactgcagctggattcttaatggataaagaaattaagtttattggcggcgtagttaacgatccacataaaccagttgttgctattttaggtggagcaaaagtatctgacaaaattaatgtcatcaaaaacttagttaacatagctgataaaattatcatcggcggaggtatggcttatactttcttaaaagcgcaaggtaaagaaattggtatttcattattagaagaagataaaatcgacttcgcaaaagatttattagaaaaacatggtgataaaattgtattaccagtagacactaaagttgctaaagaattttctaatgatgccaaaatcactgtagtaccatctgattcaattccagcagaccaagaaggtatggatattggaccaaacactgtaaaattatttgcagatgaattagaaggtgcgcacactgttgtatggaatggacctatgggtgtattcgagttcagtaactttgcacaaggtacaattggtgtatgtaaagcaattgcaaaccttaaagatgcaattacgattatcggtggcggtgattcagctgcagcagcaatctctttaggttttgaaaatgacttcactcatatttcaactggtggcggcgcgtcattagagtacctagaaggtaaagaattgcctggtatcaaagcaatcaataataaataataaagtgatagtttaaagtgatgtggcatgtttgtttaacattgttacgggaaaacagtcacaagatgacatcgtgtttcatcacttttcaaaaatatttacaaaacaaggagtgtctttaatgagaacaccaattatagctggtaactggaaaatgaacaaaacagtacaagaagcaaaagacttcgtcaatacattaccaacactaccagattcaaaagaagtagaatcagtaatttgtgcaccagcaattcaattagatgcattaactactgcagttaaagaaggaaaagcacaaggtttagaaatcggtgctcaaaatacgtatttcgaagataatggtgcgttcacaggtgaaacgtctccagttgcattagcagatttaggcgttaaatacgttgttatcggtcattctgaacgtcgtgaattattccacgaaacagatgaagaaattaacaaaaaagcgcacgctattttcaaacatggaatgactccaattatatgtgttggtgaaacagacgaagagcgtgaaagtggtaaagctaacgatgttgtaggtgagcaagttaagaaagctgttgcaggtttatctgaagatcaacttaaatcagttgtaattgcttatgaaccaatctgggcaatcggaactggtaaatcatcaacatctgaagatgcaaatgaaatgtgtgcatttgtacgtcaaactattgctgacttatcaagcaaagaagtatcagaagcaactcgtattcaatatggtggtagtgttaaacctaacaacattaaagaatacatggcacaaactgatattgatggggcattagtaggtggcgcatcacttaaagttgaagatttcgtacaattgttagaaggtgcaaaataatcatggctaagaaaccaactgcgttaattattttagatggttttgcgaaccgcgaaagcgaacatggtaatgcggtaaaattagcaaacaagcctaattttgatcgttattacaacaaatatccaacgactcaaatcgaagcgagtggcttagatgttggactacctgaaggacaaatgggtaactcagaagttggtcatatgaatatcggtgcaggacgtatcgtttatcaaagtttaactcgaatcaataaatcaattgaagacggtgatttctttgaaaatgatgttttaaataatgcaattgcacacgtgaattcacatgattcagcgttacacatctttggtttattgtctgacggtggtgtacacagtcattacaaacatttatttgctttgttagaacttgctaaaaaacaaggtgttgaaaaagtttacgtacacgcatttttagatggccgtgacgtagatcaaaaatccgctttgaaatacatcgaagagactgaagctaaattcaatgaattaggcattggtcaatttgcatctgtgtctggtcgttattatgcaatggatcgtgacaaacgttgggaacgtgaagaaaaagcttacaatgctattcgtaattttgatgccccaacttatgcaactgccaaagaaggtgtagaagcaagctataatgagggcttaactgacgaattcgtagtaccattcatcgttgagaatcaaaatgacggtgttaatgatggagatgcagtgatcttctataatttccgacctgatagagcagcgcaattatcggaaatttttgcgaacagagcattcgaaggctttaaagttgaacaagttaaagacttattctatgcaacattcactaagtataatgacaatatcgatgcggctatcgtcttcgaaaaagttgatttaaataatacaattggtgaaattgcacaaaataacaatttaactcaattacgtattgcagaaactgaaaaataccctcacgttacttactttatgagtggtggacgtaacgaggaatttaaaggtgaacgccgtcgtttaattgattcacctaaagttgcaacgtatgacttgaaaccagaaatgagtgcttatgaagttaaagatgcattattagaagagttaaataaaggtgacttggacttaattattttaaactttgctaaccctgatatggttggacatagtggtatgcttgagccgacaatcaaagcaatcgaagcggttgatgaatgtttaggagaagtggttgataagattttagacatggacggttatgcaattattactgctgaccatggtaactctgatcaagtattgacggatgatgatcaaccaatgactacgcatacaacgaacccagtaccagtgattgtaacaaaagaaggcgttacacttagagaaactggtcgcttaggtgacttagcacctacattattagatttattaaatgtagaacaacctgaagatatgacaggtgaatctttaattaaacactaatattgtaaaagatgttaagtaaacgcttaatgacacttattttttgaaaataatagtaatatcattttgttaaatgaaagaataaagctataataattatagaataactatttaaaggagattataaacatgccaattattacagatgtttacgctcgcgaagtcttagactctcgtggtaacccaactgttgaagtagaagtattaactgaaagtggcgcatttggtcgtgcattagtaccatcaggtgcttcaactggtgaacacgaagctgttgaattacgtgatggagacaaatcacgttatttaggtaaaggtgttactaaagcagttgaaaacgttaatgaaatcatcgcaccagaaattattgaaggtgaattttcagtattagatcaagtatctattgataaaatgatgatcgcattagacggtactccaaacaaaggtaaattaggtgcaaatgctattttaggtgtatctatcgcagtagcacgtgcagcagctgacttattaggtcaaccactttacaaatatttaggtggatttaatggtaagcagttaccagtaccaatgatgaacatcgttaatggtggttctcactcagatgctccaattgcattccaagaattcatgattttacctgtaggtgctacaacgttcaaagaatcattacgttggggtactgaaattttccacaacttaaaatcaattttaagcaaacgtggtttagaaactgcagtaggtgacgaaggtggtttcgctcctaaatttgaaggtactgaagatgctgttgaaacaattatccaagcaatcgaagcagctggttacaaaccaggtgaagaagtattcttaggatttgactgtgcatcatcagaattctatgaaaatggtgtatatgactacagtaagttcgaaggcgaacacggtgcaaaacgtacagctgcagaacaagttgactacttagaacaattagtagacaaatatcctatcattacaattgaagacggtatggacgaaaacgactgggatggttggaaacaacttacagaacgtatcggtgaccgtgtacaattagtaggtgacgatttattcgtaacaaacactgaaattttagcaaaaggtattgaaaacggaattggtaactcaatcttaattaaagttaaccaaatcggtacattaactgaaacatttgatgcaatcgaaatggctcaaaaagctggttacacagcagtagtttctcaccgttcaggtgaaacagaagatacaacaattgctgatattgctgttgctacaaacgctggtcaaattaaaactggttcattatcacgtactgaccgtattgctaaatacaatcaattattacgtatcgaagatgaattatttgaaactgctaaatatgacggtatcaaatcattctataacttagataaataattttctttataatcaaatgctgacataattttagttgaggattattatgacggtataaattaaataaagattttgagttcacgcttaaataagttcacgcttaaatttatagcctgccacagagttgagactgtggtaggttttttattttgaagtattaatcataacagactaataatcatgaggtaactaataacacatatttaacttgtattcttaaactggtataataaatttatgttgaaatgaatattgtatgacagggtattcacttttattaaaaggtaaaattaaataaaggttttatagaacgtatttaaatatatgaggagtaaacaaatggctgatagaacgaataaagaaattaaaacaggacgctttattgcaactgcatcaatcgtattctcaatattattgattattcattactttgtttcgttggataatgcgactgccaaagcattacttaatttaacgaatcaaaacacttcagataaagcgattgattacattttaaacagctttagattcactggtattatgtatattttggcttatctagcaggcttcatcactttttggaatcgacatacttatgtgtggtggtttatgtttgcagtttatgtatcaaatagtttgtttacgttgattaatttatcaatcacaattcaagcaataaaagctgcacacggtgcgtacttaacattgccaattttaattgttattataggttcggttgcattagcgatttatatgcttgttgtttctatcaaacgtaaaagtacatttaatcgctagaaaattgattttaacaataaaaatatgatatactacttgtcgtatataaggaacggaggacaatttatgcatacatttttaatcgtattattaatcattgattgtattgcattaataactgttgtactactccaagaaggtaaaagcagtggactttcaggtgccatcagtggtggtgctgagcagttattcggtaaacaaaaacaacgtggcgtcgatttattcttaaatagattaacaattattttatcaatattattttttgtacttatgatttgcataagttatcttggtatgtaaggtccggcgatgtaaatgtcgggcttttttatttataattaagaatgtaatagtttaacaataagctatgtaaaatatatagcctagttaagtatgcaaagggagcgttagatttatgcagataaaattaccaaaacctttcttttttgaggaaggtaaacgtgccgtgttattactacatggttttacaggcaattcgtctgatgttcgtcaattaggtcgatttttacaaaagaaaggttatacatcatatgcaccgcaatatgaaggccacgcggcaccaccagatgaaatactgaaatctagtcctttcgtttggtttaaagatgcgttagatggttatgattatcttgttgaacaaggttatgatgaaattgttgttgctggtctatcattaggtggggattttgctttaaaattaagcttaaatagagatgtaaagggtattgtaacgatgtgtgctcctatgggtggcaaaactgaaggtgccatttatgaaggctttttagaatatgcacgcaattttaaaaagtatgaaggtaaagatcaagagactattgataatgaaatggatcattttaaaccaactgaaactttaaaagaactaagtgaagcattagatacgattaaagagcaagttgatgaagtgttggatcctattttagtgattcaagcagaaaacgacaatatgattgatccacaatccgcaaattatatatatgaccatgtagattctgatgacaaaaatatcaagtggtacagtgaatctggacatgttattacgattgataaagagaaagaacaagtatttgaagatatttatcaatttttagagtcattagactggtcagaataaaaagagattttaacattagaaaggaggggcataatgaatttaaagcaatctatagaagagattattaatcaacctgaatatgaacctatgtcagtgtcagattttcaagatgcattaggtttaagcagtgccgactcgtttagagatttaattaaggtgcttgtggagttagaacaatcaggattaatcgaacgtacaaaaacagacagataccaaaaaaagcatagttatagaggtcaatcaaaattgataaaaggaacgttaagtcaaaataaaaaaggctttgcattcttaagacctgaagatgaggatatggaagatatatttattcccccgacgaaaattaatcgtgccttggatggagatactgttattgtagaaatccatcaatcaaaaggtgaacataaaggtaaaatcgaaggggaagttaagtcgattgagaagcattctgtaactcaagttgttggtacgtatagtgaagctagacattttggctttgttattccggatgataaacgtattatgcaagatattttcattcctaaaggtcaaagtttaggcgcagtcgatggtcataaggtacttgtacaaattactaagtatgctgatggttcagataatccagaaggacatatttctgctattttaggacataaaaatgatcctggcgtagatattttatctattatctatcaacatggcatagaaattgaatttcctgatgaagtgttacaagaagctgaagcagtacctgatcatattgaaaatactgaaattaaaggccgtcatgatttacgtgatgaattgacaatcacaattgatggtgctgatgctaaagacttagatgacgcaattagtgttaaaaagttagcgaacggtaatacgcaattaactgtaagtattgctgatgtcagctattatgtaacagaaggttctgcattggataaagaggcatatgatagagcgacaagtgtatatcttgttgaccgtgtaattccaatgattccacatcgattaagtaatggtatttgttcattgaatcctaatgttgatcgtttaactctaagctgtcgcatggaaatcgatgctagtggtcgcgttgttaaacatgaaatttttgatagtgttatacattctgattatcgaatgacgtatgatgcggtaaatcagattattactgaaaaggatcctaacattcgcgaacaatataatgaaattacgcctatgctagatttagcacaagatttatctaatcgtttgattcaaatgagaaaacgacgtggtgaaatcgattttgatattagtgaagcaaaagtattagttaacgaagacggtataccaacagatgttcaattaagacaacgtggcgagggtgaacgtctaattgaatcatttatgttaattgcaaatgaaacagttgctgaacattttagtaagttagatgtaccttttatttaccgagtgcatgagcaacctaaatcagatcgcttaagacaattctttgattttattacaaactttggcatcatgattaagggtactggcgaagatattcatccaacaacacttcaaaaggttcaagaagaagtagaaggtcgacctgaacaaatggtcatttcaacaatgatgttgcgttcaatgcaacaagcgcattatgatgatgtgaacttgggacattttggcttatcagctgaatattatacgcattttacatcaccaattagacgttatcctgatttaacagttcatcgtttaatccgtaagtatttaattgagaaatcaatggataacaaagaagtgaagcgttgggaagacaaattgcctgagttagctgaacatacttctaaacgtgaacgtcgtgctattgaggcagaacgtgatactgatgaattgaaaaaagcagaatatatgattcaacatattggtgatgaatttgaaggtattgtcagctcagtagctaacttcggtatgttcattgaattgccaaatacgatagaaggtatggttcatattgcgaatatgactgatgattattaccgttttgaagagcgtcaaatggcattaattggtgagcgtcaagctaaagtatttagaattggtgacacagttaaggttaaagtgacgcatgttgatgtagatgaacgattaattgattttcaaattgtaggtatgcctttaccgaaaaatgatcgatcacagcgcccagcgcgaggtaagacaattcaagccaaaacgcgtggtaaatcattagataaatcaaaatctgatgataagggtcgtaagaaaaaaggtaagcaacgtaaaggtaaaaaccaacgtaataatgataaatcaggtaatagtaagcataagccattttataaagataaaagtgtgaaaaagaaagcacgtcgtaagaaaaaataagcagcaatgaggtgagtatgaatggctaagaagaaatcaccaggtacattagcggaaaatcgtaaggcaagacatgattataatattgaagatacgattgaagcgggaattgtattgcaaggcacagaaataaaatcaattcgccgaggtagtgctaaccttaaagatagttatgcgcaagttaaaaacggtgaaatgtatttgaataatatgcatatagcaccatacgaagaagggaatcgttttaatcacgatcctcttcgttctcgaaaattattattgcacaagcgtgaaatcattaaattgggtgatcaaacacgtgagattggttattcgattgtgccgttaaagctttatttgaagcatggacattgtaaagtattacttggtgttgcacgaggtaagaaaaaatatgataaacgtcaagctttgaaagaaaaagcagtcaaacgagatgttgcgcgcgatatgaaagcccgttattaagcgatttagttgcttaatcgggctatatttgatatagttatatgtgcttttgtaaattacaaaagtatgatttgtttgatttattatttcggggacgttcatggattcgacaggggtcccccgagctcattaagcgtgtcggagggttgtcttcgtcatcaacacacacagtttataataactggcaaatcaaacaataatttcgcagtagctgcctaatcgcactctgcatcgcctaacagcatttcctatgtgctgttaacgcgattcaaccttaataggatatgctaaacactgccgtttgaagtctgtttagaagaaacttaatcaaactagcatcatgttggttgtttatcacttttcatgatgcgaaacctatcgataaactacacacgtagaaagatgtgtatcaggacctttggacgcgggttcaaatcccgccgtctccatatttgtagcctacagcctttgtggttgtgggcttttttattttgtgtttttcaggggataatgcattgcagaatttgttgtgagtattgatatagcagtgtttgtataggtgtttatttgatggaggaaagagtaataagtgattatgaattagtttttgagatataaggggacagtgatgtgtgtcaaataagtgtcaaaaaagttggattctgagttttacattcaacattgttcatgaagaaacttctttatacgcaaaaaattctccatgttatatatgtcaatataaaaatgtgaatcgtctacacttaattggataaatggctactgaaaaagaacttttcatttttgttacgtcactaagtgggtgtagttataaagagatgagccgagttttgatattttcattagaatcaatatgcctattaacacaatcagcaatagttgacgagacggaaataaaagaagtcgtagttaagaaatgcatttcacaacataccattgtagccatttttattgttttggatgataaactctttttggaatttttagtttttataatttgcaactacactacttcttttactaatattaatgtctaagtaatcgataaaaaattttccattgaataaatgagaagttaaaaactttacttaacctttctcattgcattttcctattcacgattttaagaacccaacatactacaaacgaattttaaaaggcgagagtaaagcttacttgtttattatacatatttaaaatccaagagtcagaacagactactcctctttataactataaaaaatagctatgaaaaaatctatcgtcatagattccttcatagctaatcttagtatgtttatttttattttaggatgctatttatcaactcaacatataactcactatttttataaccttctaatatatcattaacttgtctaataggtatttctggtacttctctaatgttttccaattttgttttaaattgtttttttgttatttgctctttatttgtagccaattggaacaagtaagaatctagcatattaatttctttatatgaatacatatatcttaataacactaaatctctagtttttaagttaggcgctagttcttcttgtaattgttctattgattgtttcattaataacaatctcatttctaattcttcattattcattttatcacactctttttatattaatgcttgaccaacttgggaaacccaaaaccctatgcttcttgcagtagaatctttaataccagttcccatcaatgcttgtgaaacttgaccttgtacatttccccatgtagcctcttcttgttttaatgcattattcaatgcgggatttacaaatttatcccatcttttttttatgattttccggcacggggactgatttctttaacaccattaaacacagattttttatttttaatcatagctttatagtatcatgttggctaagctataaataagtcagtttctctaaaaattaaataactgaatgtaagacaatcaacaaaccaaatttatacttcatctaaaccactgtggtcgtcatctttttgcttttctttttctttctctcgttcttgttcttttttgtactcttcttcaaattctttttctttcttttctacttcttctcttgtttccgctctatgagaaaaatcttcggttttaagtttactaaatttgaatgatttagaatcaactgttttatcttctgagtatttatggacatttaaattaatatttccatcacctcttaactcatagataaacatggcttgtgcagttttgccttttttaatttgatcttggttatgttctgtccaatctttatattttttatcacttaaaagataaccatctcttaatttatttactgtatttttatcatcttgagtgatattaatatagtcatgagaaatagaagatggatttaaatctttatcgtcttttttagcagtaatttccattttaaaagcgatatatttctttttctcatctttttcattgatgataaacggttcttttattttagcttcaaatttgtcactaacaatagtatcgcctttaatttttatatccatattttttttgcttttaaattctttaagttcttcatttaattcttcattgtcattttctttctttttgtgactagtgctctctttttttgcactatcttgatgatgtccacaagcacctaagataagtgtacttgctaataatatccccattacttttttcatttaacatgtctcctttatttcgcaaaaatttattttaaaaactctaaatgacttatcattttgagtaattaaacaaagttgatattttgtgagattctaagatgatattaaataattcttgtaataatgatcctatgtattgttgcaataaattaatgaaactataattactaatattatattacttttattgatagaaatatattacttttttaaaaaaacttgtaatatatcgaaagatttaaatgtaaaattttgatttgttaagaaattacgtttgtaaaaataaaaaaatcaacttatttgtatgagataaatatgtattgaagaagacgtgttattaatttggaaaatactggtcaaagatgggagctcttaaaagcgttattgtattttttagtcaatacaaatagattgccgtaataataatcgtacttgatggttaaaaaattacttaaggctataaagcaaaactttttatatgagcagtcgaatataacgtttaaaatgattgtttttggatataaacgattaagtaaaatgctttttcagtttgaaattaatcatataaatttcttatgggagggttgatatcttaatgattaacattatttcagctataggatctattggaacatttattatggctttattttattttgtatcagtttcagttcaactttatcaaatgaaaattagctttctgccagctttaggttttaaccaaattttattagaaagggaggaggatcaacttaatataatgaattcggcaacagaagagcatcatcataaagattatattaaactatataatttaggtggcggtgctgctaaaaaaattgcaatagaggttttattggggaaggataaagtcattcagaaaaaatacgtgcatattttacctagtaaagaagggtacatgttaccaattaataaaaatgtgtacgaagaattagaaagaacgattgagaacaatggtcatgaagctgatttgaatgtacgtatgacttattatcataatgtaagtcgcaaacaacaggaagttatattaaaaggtcaaatcgaccgttttaatacttataataataaagaaatttatgatttgcagtttatctaaaaattgatttaagagggtagttgtttattgcgaaaaatatcattcaattttaatgaaataatggcgtcattactataaaatattactttatgttgtaatgcatttttctataagatagaactaaaaggaggggcaaagatgcaaattagacaaatacatcaacatgactttgctcaagtggaccagttaattagaacggcatttgaaaatagtgaacatggttatggtaatgaatcagagctagtagaccaaattcgtctaagtgatacgtatgacaataccttagaattagtagctgttcttcaaaatgaagttgtagggcacggtttactaagtgaagtttatcttgataacgaggcacaacgggaaattggattagtgttagcacctgtatctgttgatattcatcatcaaaataaaggtattgggaagcgattgattcaagcattagaacgagaagcaatattaaaaggatataattttatcagtgtattaggatggccgacgtattatgccaatctaggatatcaacgcgcaagtatgtacgacatttatccaccatatgatggtataccagacgaagcgtttttaattaaagaattaaaagtgaacagtttagcgggaaaaacaggtaccataaattacacatctgcttttgaaaaaatatgatttcaagctaggattacattaggtagagttcatattaataataaaaaatgtttgcaatcaaatcgtacgttgtcgtttgtaattcttaaaatagcaataaataaaatgtttgttagtaaagtattattgtggataataaaatatcgatacaaattaattgctataatgcaattttagtgtataattccattgacagagattaaatatatctttaaagggtatatagttaatataaaatgactttttaaaaagagggaataaaatgaatatgaagaaaaaagaaaaacacgcaattcggaaaaaatcgattggcgtggcttcagtgcttgtaggtacgttaatcggttttggactactcagcagtaaagaagcagatgcaagtgaaaatagtgttacgcaatctgatagcgcaagtaacgaaagcaaaagtaatgattcaagtagcgttagtgctgcacctaaaacagacgacacaaacgtgagtgatactaaaacatcgtcaaacactaataatggcgaaacgagtgtggcgcaaaatccagcacaacaggaaacgacacaatcatcatcaacaaatgcaactacggaagaaacgccggtaactggtgaagctactactacgacaacgaatcaagctaatacaccggcaacaactcaatcaagcaatacaaatgcggaggaattagtgaatcaaacaagtaatgaaacgacttctaatgatactaatacagtatcatctgtaaattcacctcaaaattctacaaatgcggaaaatgtttcaacaacgcaagatacttcaactgaagcaacaccttcaaacaatgaatcagctccacagagtacagatgcaagtaataaagatgtagttaatcaagcggttaatacaagtgcgcctagaatgagagcatttagtttagcggcagtagctgcagatgcaccggtagctggcacagatattacgaatcagttgacgaatgtgacagttggtattgactctggtacgactgtgtatccgcaccaagcaggttatgtcaaactgaattatggtttttcagtgcctaattctgctgttaaaggtgacacattcaaaataactgtacctaaagaattaaacttaaatggtgtaacttcaactgctaaagtgccaccaattatggctggagatcaagtattggcaaatggtgtaatcgatagtgatggtaatgttatttatacatttacagactatgtaaatactaaagatgatgtaaaagcaactttgaccatgcccgcttatattgaccctgaaaatgttaaaaagacaggtaatgtgacattggctactggcataggtagtacaacagcaaacaaaacagtattagtagattatgaaaaatatggtaagttttataacttatctattaaaggtacaattgaccaaatcgataaaacaaataatacgtatcgtcagacaatttatgtcaatccaagtggagataacgttattgcgccggttttaacaggtaatttaaaaccaaatacggatagtaatgcattaatagatcagcaaaatacaagtattaaagtatataaagtagataatgcagctgatttatctgaaagttactttgtgaatccagaaaactttgaggatgtcactaatagtgtgaatattacattcccaaatccaaatcaatataaagtagagtttaatacgcctgatgatcaaattacaacaccgtatatagtagttgttaatggtcatattgatccgaatagcaaaggtgatttagctttacgttcaactttatatgggtataactcgaatataatttggcgctctatgtcatgggacaacgaagtagcatttaataacggatcaggttctggtgacggtatcgataaaccagttgttcctgaacaacctgatgagcctggtgaaattgaaccaattccagaggattcagattctgacccaggttcagattctggcagcgattctaattcagatagcggttcagattcgggtagtgattctacatcagatagtggttcagattcagcgagtgattcagattcagcaagtgattcagactcagcgagtgattcagattcagcaagcgattccgactcagcgagcgattccgactcagacaatgactcggattcagatagcgattctgactcagacagtgactcagattccgacagtgactcagattcagatagcgattctgactcagacagtgactcggattcagatagcgattcagattcagatagcgattcagattccgacagtgattccgactcagacagcgattctgactccgacagtgattccgactcagacagcgattcagattccgacagtgattccgactcagatagcgattccgactcagatagcgactcagattcagacagcgattcagattcagacagcgattcagattcagatagcgattcagattccgacagtgactcagattccgacagtgactcggattcagatagcgattcagattccgacagtgactcagattccgacagtgactcagactcagacagtgattcggattcagcgagtgattcggattcagatagtgattccgactccgacagtgactcggattcagatagcgactcagactcggatagcgactcggattcagatagcgattcggactcagatagcgattcagaatcagacagcgattcagattcagacagcgactcagacagtgactcagattcagatagtgactcggattcagcgagtgattcagactcaggtagtgactccgattcatcaagtgattccgactcagaaagtgattcaaatagcgattccgagtcagtttctaacaataatgtagttccgcctaattcacctaaaaatggtactaatgcttctaataaaaatgaggctaaagatagtaaagaaccattaccagatacaggttctgaagatgaagcaaatacgtcactaatttggggattattagcatcaataggttcattactacttttcagaagaaaaaaagaaaataaagataagaaataagtaataatgatattaaattaatcatatgattcatgaagaagccaccttaaaaggtggcttttttacttggattttccaaatatattgtttgaatataattaataattaattcatcaacagttaattattttaaaaaggtagatgttatataatttggcttggcgaaaaaatagggtgtaaggtaggttgttaattagggaaaattaaggagaaaatacagttgaaaaataaattgctagttttatcattgggagcattatgtgtatcacaaatttgggaaagtaatcgtgcgagtgcagtggtttctggggagaagaatccatatgtatctagtcgttgaaactgactaataataaaaataaatctagaacagtagaagagtataagaaaagcttggatgatttaatatggtcctttccaaacttagataatgaaagatttgataatcctgaatataaagaagctatgaaaaaatatcaacagagatttatggctgaagatgaggctttgaagaaattttttagtgaagagaaaaaaataaaaaatggaaatactgataatttagattatctaggattatctcatgaaagatatgaaagtgtatttaatactttgaaaaaacaaagtgaggagttcttaaaagaaattgaagatataaaaaaagataaccctgaattgaaagactttaatgaagaggagcaattaaagtgcgacttagaattaaacaaattagaaaatcagatattaatgttaggtaaaacattttatcaaaactatagagatgatgttgaaagtttatatagtaagttagatttaattatgggatataaagatgaagaaagagcaaataaaaaagcagttaacaaaaggatgttagaaaataaaaaagaagacttagaaaccataattgatgaattttttagtgatatagataaaacaagacctaataatattcctgttttagaagatgaaaaacaagaagagaaaaatcataaaaatatggctcaattaaaatctgacactgaagcagcaaaaagtgatgaatcaaaaagaagcaagagaagtaaaagaagtttaaatactcaaaatcacaaacctgcatctcaagaagtttctgaacaacaaaaagctgaatatgataaaagagcagaagaaagaaaagcgagatttttggataatcaaaaaattaagaaaacacctgtagtgtcattagaatatgattttgagcataaacaacgtattgacaacgaaaacgacaagaaacttgtggtttctgcaccaacaaagaaaccaacatcaccgactacatatactgaaacaacgacacaggtaccaatgcctacagttgagcgtcaaactcagcaacaaattatttataatgcaccaaaacaattggctggattaaatggtgaaagtcatgatttcacaacaacgcatcaatcaccaacaacttcaaatcacacgcataataatgttgttgaatttgaagaaacgtctgctttacctggtagaaaatcaggatcactggttggtataagtcaaattgattcttctcatctaactgaacgtgagaagcgtgtaattaagcgtgaacacgttagagaagctcaaaagttagttgataattataaagatacacatagttataaagaccgaataaatgcacaacaaaaagtaaatactttaagtgaaggtcatcaaaaacgttttaataaacaaatcaataaagtatataatggcaaataattaatgcatggctgcaaagcaaataatgagtttgtcgtaaaaataacaacattttaaactagcaataaataatatcaaagtcatcatttcaatgatgcaatctagtatagtccacattctaaacaggtgtggactattacttttttcactttatattacgaaaaaattattatgcttaactatcaatatcaataattaattttaagctgaaaaacaataaaaatgttaagacaacgtttacttcaagttaattattatactgaaaattctggtatataatgctgttagtgaatataacagggaaattatattggttataatattgagtctatataaaggagaaataacagatgaaaaagaaattattagttttaactatgagcacgctatttgctacacaaattatgaattcaaatcacgctaaagcatcagtgacagagagtgttgacaaaaaatttgtagttccagaatcaggaattaataaaattattccagcttacgatgaatttaagaattcgccaaaagtaaatgttagtaatttaactgacaataaaaactttgtagcttctgaagataaattgaataagattgcagattcatcggcagctagtaaaattgtagataaaaactttgtcgtaccagaatcaaagttaggaaacattgtgccagagtacaaagaaatcaataatcgcgtgaatgtagcaacaaacaatccagcttcacaacaagttgataagcattttgttgctaaaggcccagaagtaaatagatttattacgcaaaacaaagtaaaccaccacttcattactacgcaaacccactacaagaaagttattacttcatacaaatcaacacatgtacataaacatgtaaatcatgcaaaggattctattaataaacactttattgttaaaccatcagaatcgcctagatatacacatccatctcaatctttaattatcaagcatcattttgcagttcctggatatcacgcgcataaatttgttacaccagggcatgctagcattaaaattaatcacttttgtgttgtgccacaaataaatagtttcaaggtaattccaccatatggtcacaattcacatcgtatgcatgtaccaagtttccaaaataacacaacagcaacacatcaaaatgctaaagtaaataaagcatatgactataaatacttctattcttataaagtagttaaaggtgtgaagaaatatttctcattttcacaatcaaatggttataaaattgggaaaccatcattaaatatcaaaaatgtaaattatcaatatgctgttccaagttatagccctacacactacgttcctgaatttaagggtagcttaccagcaccacgagtataaaaattggcactaagtttacgagatatgataaatacctattattttaaatatagtctacaatctatgtggttgtaggctgtattttttgcagtttatcaataaacacccatcaacaaattataccgtttttctactttgaaagttggaagtaacataatcttaaataaatatattattaattaagataaatataatactcaagattattgttaatagtttgttcatcgcaagttaattattgtttctaaaatattggtatataattttcaatggcgaagaaaacagggtgaaaaagtcggtttttatatcaaagcaaataagggagcataaacaaatgaaaaggaaagtattagtactaacaatgggtgtaatttgtgcaactcaattatggcattctaatcacgcaaacgcattagtaacagagagtggcgcaaatgatactaagcaatttactgaaattgtatcggaagagaaagttataacagttgaacatgctcaaattaatatttttcaatctaatagcaattcaaacttgatggagttcaacatattaacaatgggcggtaaatcaggagctatggttggttatagtgaaattgactcatcacatttcacagaccgtgacaaacgcgttattagacgtgatcatgttaaagaagcacaaagcttagtagagaactataaagatacacaaagtgctgatgctaggatgaaagccaaacaaaaagttaacacattaagcaaaccgcatcaaaactatttcaataaacaaattgataaggtttataatggattacaacgctaatccaaagtaaattataagttatacatctcgtttttaaatgacaatttatccccgtaaatattataaataatcttttcaaattccacatagatatagagacactaataaacctctttgtctcgatatgatagtctgcaacgattcatgttgtaggctttttaattttacaaataaggctaaatatataagttctggcacctaaaatatagaaaatacataaaagtaagtatagttattttattataattattaaatttttattaattaattgtaaaaatgtataattataattaattaacgtttaatattaaaattaactaaaaagaaagaggtgttagttatgacagaatacttattaagtgctggcatatgtatggcaatcgtttcaatattacttatagggatggctatcagtaatgtttcgaaagggcaatacgcaaagaggtttttctatttcgctactagttgtttagtgttaactttagttgtagtttcaagtctaagtagctcagcaaatgcatcacaaacagataatggcgtaaatagaagtggttctgaagatccaacagtatatagtgcaacttcaactaaaaaattacataaagaacctgcgacattaattaaagcgattgatggtgatacggttaaattaatgtacaaaggtcaaccaatgacattcagactattattggttgatacacctgaaacaaagcatcctaaaaaaggtgtagagaaatatggtcctgaagcaagtgcatttacgaaaaaaatggtagaaaatgcaaagaaaattgaagtcgagtttgacaaaggtcaaagaactgataaatatggacgtggcttagcgtatatttatgctgatggaaaaatggtaaacgaagctttagttcgtcaaggcttggctaaagttgcttatgtttataaacctaacaatacacatgaacaacttttaagaaaaagtgaagcacaagcaaaaaaagagaaattaaatatttggagcgaagacaacgctgattcaggtcaataatgctcattgtaaaagtgtcactgctgctagtggcacttttataatttttagatcacgatatgatttattatcaattcagaattaaaaaagtaaatagtatcaaaagtaagtgtatttaatattagaaaataaaaattttaaatttagtattaaaatggaatgttactatatagttcaatgtgtattatcacagaaaataaaataatgctttacttctatatttaaaagtgtataatgaaagttaagtaataaagagcgtgaagaaaaatgtgagttatttatatagaatattctccttttcatttatgaatttgttacaaaatatttagtgcaaaagcacgacggaggtattcaatatgaataacggtacagttaaatggtttaatgcagaaaaaggttttggtttcatcgaaagagaagatggtagcgacgtattcgtacacttctcagcaatcgctgaagatggatacaaatcattagaagaaggccaaaaagttgaattcgacatcgttgaaggcgaccgtggcgagcaagctgcaaacgtagttaaaatgtaattttaacttattcaaacagtccttactatagggctgtttttttatgctttaaatcgataacagttggtgtggtaaaagcactagccgttatttttttgtccaataaatttagttggagatttaacaatatataatggttctaaaataaatcgaactgatggaaaagttttttacttttcatctgtccgacttttgattttgaatataaaaaagcgccaatacagaactttaataatgacgagaattaaagtctgtatatggcgataacaagaagtaatgttaaacactcaaaatgtttaacaataataggataccacatcgcataatatcttactacttaattaataatttaactaatcaactttttgttaattttttattaagactgattaattattgagaatatttattgtttttaaaatctcataataattcagtaatcttgttttcatttaaaaggcgaaacattaaaataattaaataaaaatattgcgtttaatttacagcgtcaaatatacttatttctaatgctttggggtctactgaaacaagtaaagaatgatcgatgttactaatattgccattctccaaatttatttctgtgagtatttggaagctaccattaggcaacggtttaacaatagacaattgcttttccgcttgttgtattaaaaaaggttttgtagattgattattaatatgccattcactcatgtatgtttttcactcctgctttaaaatagggttagaaagtttatagttgagacattcatgttcaaccaaaattttgttcgaattcaataaatgtcttgtttaaaatagaaatattgtaaatgttatcgtccaaaacttcaccagttaagtatttgttttgaattaaaatttggcagttagttaagaagtcttgataatcacgatcgcaaaaatagttttcacgtgcatctttagcatcgccaaaaaagttagcgactgtttctgtttctcctttattcgaacgttcaatatataatttgtaaaatttagctattgtatacttttgttctttagttagttcattcaaaatattgggcctcctgaaatatcatttgtaatctatacccaatttattgcaaaacaaaaactaatttaactatttgatgaaactgtgttaataagctttaacaagccttagtttgtatggatctataaaattatctttaattgcatagggtgaaataatatgtagtccataacttttaactgatttttcacttacaccaaatttataagcttggtagataattttagtacaatacgtaaattttttgctgttcaaatttaatgtaactagataacgatgatttgtattctcatagtttttcttaacccattcagccgcttttttacctgcaccaggatagctgcaacgataaactttcatccaatcatttttgccacttgcataattatatttaaaagattcgaaggattgtgtagttggtttgtcgccaggcccctcaatttgtaaaatcgttttatcatcaatcgcgatactacaatgaccaaaaaatccccacatgacagggccttttgtaacaataatatcaccaggttgtaattggaatttgtcatcttgaatttctgaatacttattatctgcaattgtttttggtgagtttattggggatacgacaacgaataatataagtaaaattatcgttcgtttaatatagttcacttaaaagctccttgttgaagaaatatatgtaaatagtcttaaattagaattgtaatctttaataagcttgtaagactaaaacatatcttaaatattaaagtatgagagtgtgaaatgtctattaagaataaaaaacagtctgaaacatcattgagacgtttcagactggatataaaatgaatttcatttatagcacaccaaatataaatgtgtatattaatatagcgaatccaaaaatatagagaatgacagtgaaacttaaataggactcttttttagattctttgctagtttttttcattaatacgagtataaacgtagcggcaactaagaaaattaatgctagccaaaacagaattgcaaaatgtaaagacatgtgaaaccctccttatataccgtaattattaacctataaaactataaaaaataggataaatgtaatagagaacgagtacgatatttataaaaaataatatttcacttaaccagtttttagttatcattgcaatggtaaaggatacgatgagtatcacaccacaaatgataataccaggcaggagccaacataaatcatctaaatctttattatatgtgattaaaatattaaagataacaaaagtggtagtaataactatattgatagcatttaacaaaatgttattcatgactgacacctactagtataaaaatagcttcttaataaatatgataacactatttttcaataggtaaataaaaagtatagttatttttaaaatattatttgcagaatgctaaagtttattaattcaaacaagtgagcatatataggggtgtattgtattaatatgaaaagaatatttacatactaaaaactcttaaagttgtataattcgttaatatttttagaatcagatatcaaaaaaatgtgcaaaatcacttttgcacatttacaaatactagttttctgataagattaataataacactttaaatagcgcttaataaatgaagggggcaagtcttatgacgttttacaatttcatcatgggttttcaaaatgataacacaccatttggtatattggccgaacacgttagtgaagataaagcattccctcgattagaagaaagacaccaagtaattagagcatatgtgatgtctaattacacagatcatcaattaattgaaactacaaatagagctattagcttatatatggcaaattaatttgagtagtaccaattatgatgtattagtgcatcccaaatatcttttgttttaaagtttatttcatcatttcttatcgaaaatggtgtaataatgtctttatctaaccaagtgttgataagttcatttggtacaccatctaacaacatttcacttttactaattataaaacattcccagtcaagtgaaacattttgtggattcacataattacattgattatgattatccataaacactcactcctttaaaattctgtactcttcattgcgttttaccccgtcacattatcttttaaactaaaatcatcattacttatgaaaaaaatgtacatcaaaagcaaaggttttcgctaccgaaaaagtttaaataatggtttaatatatttggtactcattttaataaaaagagaatacattttgagctatcaatactttttattgaagaggtgttattgttggctaaaacgttatatttaatgcgccacggacaaactttgtttaattttaagggactaattcagggatttggagattcgccgctaacagaacttggaattgctcaagctcaaaaggcacgtagttattatgaaactaaggggataaacttcgatttatatgcatcatcaacgcaagaacgcgcaagtgacacacttgaaaatgttgcacctaaccaatcgtatcaacgttttaagggactgaaggaatggcattttggaatatttgaaggtgagtcagtctatctatttgataatctatacaagcctgaggacttattcggagatcgaattgttcctttcaaaggagaggcaaggcaacaagttgaagaacgcattgtgaaaactttacatgacattatgtctcaaacaaagaataatgcattagtcgtgagtcatggaacaataatgggagtatttttaagatattgccttaaactagatgaagcattaaagcataatatcggtaattgtaatatcctgaaatttgaatatgacaatggaacatttaaatttgttgagttaattgatccaaatttataataaataaagcgttatacatagacacaagtatgtcttttgtataacgcttttaaaatacaactacataacgctttagaataataattgaataagtttttgtaatatcatcagagcaacaataataattattatgcttgatattttattgattattgttaataattttccggttttatcaattgatccaaccatttttcctaaaattgcgagtaaaaagaaccataaccatgaaacgctaatacaagcgattgtaaacgcaattttattgctgccactatataatgcagcactactaccaattactccaattgtatctaaaatagcatgtggattgagtaatgaaactgataaagcaaaacttacttgtttcattggagacataatttgagtttctccatctgttgagggtttatcatgccaaatggtccaagccatatacatcaagaaaattaaaccaactatataaataattgcttgaagtacaggtaaagacataataatgatagatactcctaccactgcaataataataagtaagctgtctgacaacccggctgtaattattgcaggcaatacatatctatattttggttgattagctccttggttaaaaataaatacattttgtgcacctaaaggtaaaattagaccaatcgctaagataaatccatgaataattgcggttaccattaagttttgacacccctaaaacatagaatattctgaaaaaacttattgttatcatatcaaataaaaaacaactactcaatagtagagtagttgtatgaaaaatagaacctatatgatttgaatttatgagaaatgtagaatatataaaactgtattacttattaatcaaatcataaaaaagccaatgttcatcgaaataggtatttccgattttaattgcatttttctcaaaaccaagaatgtcgaatcctagtgcactatagaaaactttagcacctatgttgtttgacacaattgatgtaagtaaagattcgtaattgttctgccgtgcataattaataatgaaattaatgagctcgctattaatcgatttatcgttattagtaacaaagttgtatttaattaatgatttatgttcttttccaacgtatcgaatttgttctaaggcagctgttgcgataagtgtttcgttttcataacagccaaatacaatacatttcggtgaaccttgatttaaaatgtcatgtattaaggtgtcagtcattgtttgactataatgtgaatcttgagtgaattcttcattgactgtcgaaacaagtctcttatactcattaaaatcattattcgttaatgttttaatttcaatcattactgacctccttaatcattattaagaaagattttgtactaaaaaaatttcttaattacatattaaaatgtttattaaaattttgcaatcactgatttatatgcacattcttgtaaatggattatcaatttaattatatttatttttaagttcaggaaattatggaattggttattggtcgacactggacttttatttgtagacggtatgcgaagaagtcaagccagtattggaaccggtcacatttatgatgactaaggtacaatcattttcagttaaatattgccagaaatttcaatcacgaatagaaaaaataaccaaccaaaaatttttggttggcaaatttgaattttatgtgaattttattaataacgttgaataatctctttaagttaatgctaatctacaacatttacatttaaatcgacattaatatttccttgagtcgcttttgaatatggacaaaattcatgagccatttgtaaatatttttcagcttcttcttgagatataacatttttaattgtcgcatcaattgaaacacttaatttaggactttctgagtctgaatcatcttctagtctcactgttagtgttacttctggatgagcatcacgcactttgttttgctttaaaattaggtcgaaagcaccgttgaagcaagatgcataacctgctgcaaataattgttcggggttagtagctttaccatctgcttgagcaggcggaacgatatcaatatctaatgctcgatcatcagtataaacatgtcctttacgtccgccaacattcgtcgctttagtttcataatgtattgccatacttataacctcctaatttaaaatacatttatgctttacccattcgaaaataccttaatcattttcatttatagcattgtttgattgaaggataaaaagttgttgtttacaataaaaataatgagtatctgaaatgagggattcactatgacacatgtggaagtagtagcgactatcgcgccacaattatctatcgaagaaactttaattcaaaaaattaatcatcgtattgatgcaatagacgtattagaattacgaattgatcaaattgaaaatgtcacagttgatcaagtggcagaaatgattacaaagctgaaggttatgcaagattcattcaaattattagttacgtatcgtacaaagttacaaggtggctatgggcaatttacaaatgactcgtatcttaatttaatatcagacttagcaaatatcaatggcatagatatgattgatatagaatggcaagcagatattgacattgaaaaacatcaacgaatcattacacatttgcaacagtataataaagaggtggttatatcacatcataatttcgaaagtacgcctccattagatgaattgcaatttatattttttaaaatgcaaaaattcaacccagaatacgttaaattagcagtaatgccacataataaaaatgatgtgttaaatttattgcaggcaatgtctacattttcagatactatggactgcaaagttgttggtatttcaatgtctaaacttggactaataagtagaacggctcaaggcgtttttggtggtgcgttgacttatggttgtatcggagtaccacaagctccaggacagattgatgttactgatttaaaagcacaagtgactttatactaataaaatgaattaggttgcttttgtgtaagtgctgtcttataattgagaagtattatcattgttcgtggaggagcgattttagatggaattacaacaagcaatagctaatagaagaagtgtgaaaaaatttaaaagagatatgcacatagatgacgcattgctatatcaagcaattgagaaagctgctgatgctccaaatcacggaatgagggaaccatggagagttgtgcatgttccgaaagacagattaggagatatgagtaaggatatttctaaatttgcatttcctaatgaattagataagcaacaatgtcattatgatgcagttacgaaactaggtggcatgttattgcttattttaaaaacagatccaagacaacgtcaaaatgatgaaaactactttgcatttggtgcatatgcacaaaatcttatgttgttactttatgaagcgggaataggtacatgttggaaatcgccattatatatctatgatcctaaagtaagaaaaacacttggtataaagaaagatgaagttcttgctggattcttatatttaacggatttagaagaagatatgcctaaagcaccacgtaaaaatagaaacttaattacattatattaatatgtataattatagaaacattaataaaagctgagtcatgaattgatggacatctatcgagttagagatttaatctaacttactagagtcggtacaataacagtctcagctttttattgtgcagtatatacacatttttattttagtatttatttaaaagtttctgctaaaaatgattcaacttgttcaggtgacttagcatttgctgaatgaaggtgtgcaattttatcgccgtttttaaatactagcaagctagggatacccataacttcattttcaacaactacatcttctaattcatcacgattaacagtataccattggtaatcattatattgttctacgattgggtcaatccataaatccatagcacgacagtctgggcaccatcctgcctcaaatttaacaattacaggtgtatcgctattaattacagatttaaatgattcattacttttgattgattgcattgtaacaactcctctagatagtttaataatttttattatagctaaatttatatcataataaaaaattttagcttcaaaatgaaagccttttgctttggaaaatgatatatttattttaaatacataaaggaggttgcagtcgtatgattaaattttaccaatataagaattgtacaacttgtaaaaaggcagcaaagtttttagatgaatatggcgtaagttatgaaccaattgatatcgttcaacatacacctacaataaatgaatttaaaacaataattgcaaatacaggcgtagaaattaataaattgtttaatacacacggcgcgaaatatcgtgagcttgatttgaaaaataaattacaaactttatcagatgatgaaaagttagagttgttatcatctgatggtatgttagtaaagcgtcctctagcagtaatgggcgataagataacattaggatttaaagaagatcaatataaagagacttggttagcgtaagtgaaatgtaagcgtttactaaatatctcgatatttagattcattacatgtaaaatgaaataagctatacaattgttaatttttataaatatagttgaatagcatctagccttatggcatcattaatgatgtaaagattaattaggaggggattctcttggcagtaccaaatgaattgaaatattcaaaagagcatgaatgggttaaagttgaaggtaatgtagcaataattggaatcacagaatacgcacaaagcgagttaggtgatattgttttcgttgaattaccagaaacagatgatgaaattaatgaaggggatacgtttggtagcgtagaatcagttaaaactgtatcagaattatatgcaccaatctctggtaaagtagttgaagtcaacgaagaactagaagatagtcccgaatttgtaaatgaatctccatacgaaaaagcatggatggtaaaagtagaaattagtgatgaaagtcagattgaagctttattaacagctgaaaaatattcagaaatgattggtgaataatcaccgtgtaactccttaatctaagattgaggagtttatttttagtctgagaaaataaatgatatgaaagaaaaattattaggtactattatttggagtattgctacattttattattcaagaatgatggaaataatgaatttagctattttaaaaataaaaattgggggaagttaatatgctaaacattcaagacgttagtcatctttctaaaaaggagcaaaaagcatataaccgtttcgtagaatctgtagaaaacggtaatttaccagtactaccatgtattgaaatggatctaaaagagatgcaagaagaaacattaaaccagagtaagattggtggaatgccatttttaaaatcttttaaagatataccattagatgaaaataatgtaccaatggtattgctagcacagattaatttggatgatcttccagaacaacaagaattatttcctgtaaaagaagggatattgcagttttggattagttcagaagatcaaatgtatggaatgtctgaaaatttaaagggaaacaatataaactcaaggcttgtttatataaaagagccaattacagatttatcactcgaaaatattcaagcgcatttgaagtcattagatgctgataatgaggatatcccgttcagtggagcattttctatagaatttagattgtcgaaacaaactattacatgtactgattataagtacgatgaggacgtgcttgcattgtggaataaagtcaatccatccttcgcgctaaaatcaatgtttggtggttatgatgaattgatggaacctgtgtgtaacacatttactgctaaggaaccatttaatcaacttggtggttatccatattttgaccaaatagatccaagaacgaacgatcaagaactgaaaatgtatgatagagtcttactgcaaattgattctacaagagatggtaattcttcgattatatggggtgatttaggtattgccaatatcttagtgaaatctactgaccttgaggctatgaagtttgatgattacatgtattcatgggattgcagctaagagaatcataaaaatatattactttaataagtgtagtatctatagatcaatctagggagtgggacataaatgatattttcgcaaaatttatttcgtcgtcccaccccaacttgcattgtctgtagaaattgggaatccaatttctctttgttggggcccatccccaacttgcattgcctgtagaatttcttttcgaaattctctgtgttggggcccctgactagaattgaaaaaagcttgttacaagcgcattttcgttcagtcaactactgccaatataacttcgtagagcatagaacattgatttatgtcccagcctgttttcataagccacagctaatgtgtatttaaaaataggaatacatgagtaaaactcatgcataagaaatactaatttctaaagaaaaagtatttctttatgttggggccccgccaacttgcacattattgtaagctgacttaccatcagcttctgtgttggggccccgctataattgaaaagtttgttataggtgtattttcttttggttaactattgttaatataacattgtagattttaggatgttgatttttgacttagcctttgtctgcttatgttaaatgttccagctagtcaaacattgagtttgtaattattatattaagctagtttaaattttttgtgatttatgttttattcataccaattttgtgaaatgatacagtgacagatgtttattgattttaaagggtgatgatgatggctattgtaaataaagtgataattgttgaaggaaaatctgataaaaaaagggtgcaacaggttattgcagaaccagtcaatattatttgtactcatggaacaatgagtatagataagcttgatgatatgatagaatcactgtatgataaacaagtttttgtattagccgattctgatgacgaaggagatcgaattagaaattggtttaaacgttatttgagtgaaagtgaacatatatttattgataaaacttactgtcaagttgcgaattgccccaaacaatatttggcgcatgtactttcaaaacatggctttacttgtaagaaagaaacacctcttttaccgaatataaataatgaaaggttagttttagtaaatgaataattcattagacatcaaagatgtaactacattttatgaggaagacaaacatttaatctttggttatacaccaacgtgtggtacttgtaaggtttcagaaagaatgttagacattgctaatgaaatattgcagttaccattattgaaaatagatttaaacttttatcctcagttttgtaaagatatgcaaatcatgtctacgccgattttattgttgatgaataaagataaagaagtaaaacgaatttatgcatttaaatcggtgactgatttgttagaaaatttaaaatagttattgacgaaattttactaaggtgttaggattaatacaaattaaatgatgcgtaaactcttatcgagagtggtggagggatgtgccctacgaagcccggcaaccgtcttatatagaaatggtgccaattcacataaagttttaacttttgaagatgagagaaacaatactactattgctttctcaatttttctatcgatattgagaaagcattttttattttattaagcaacacagggaggaatcaacgtgattgaattaaaagaagttgttaaagaatatcggactaaaaataaagaagtccttgctgtagatcacgttaatttatcgattcgagcaggatcgatttatggcgtcattggtttttctggagcaggaaaaagtactttgattcgaatgtttaatcatttagaagcgcctacatcaggtgaagttattatagatggagaccatataggtcaattgtccaaaaatggattaagagcaaaaagacaaaaagtaagtatgatcttccaacattttaatttgttatggtcaaggactgtgttaaaaaatattatgtttccgcttgaaattgcaggtgtccctagaaggagagctaagcaaaaagcattagaacttgtcgaactcgtcggtttaaaaggtagagaaaaggcttatccatcagagttatcaggtggacaaaagcaacgtgttgggattgcacgagcgttagctaatgatccaacggtcttgctttgtgatgaggcaacaagtgcacttgatccgcaaacaacagatgaaattttagatctactactaaaaattagagaacaacaaaatttaacaattgtactaattacgcatgaaatgcatgtcattcgtcgtatttgtgatgaagttgcagttatggaaagtggtaaagtgatagaacaaggaccggtgacacaggtttttgaaaatccgcaacacactgtgacaaaacgatttgtgaaagacgatttaaatgatgatttcgaaacatctttaacagaattagagccattagaaaaagatgcatatatcgttagattagttttcgctggttcaacaacaaccgagcctattgtatcgagtctatcaactgcctatgatattaaaattaatattttagaagcaaatattaaaaatacaaaaaatggaacagtcggctttttagttctgcatattccatatatttcaagtgtagatttcggaaaattcgaaaaagagttaattgagcgacaagttaaaatggaggtgttaagacatgggtaaatcatttagtgaaattataaatgaaatgattacaatgcctaatattcagtggccagaagtttggactgcaatagtcgaaacactatacatgacagtcgtctcaactatatttgcatttatacttggtcttattttaggtgtgttattattcttgtctgctaaaggtaagtctatcggtgcaaggttattttattctatcgtttctttcattgttaacttatttagagcgataccatttattattttaattttattattaattccatttacaagtttgatacttggaacgataagtggtccgacaggtgcgttaccagccttgatcattggcgcagcaccgttttatgcaaggctcgtagaaattgcttttaaagaaattgataaaggtgtcatcgaagcggcttggtcaatgggcgctaatacttggacagtaattcgtaaagtccttttacctgaagctatgccagcgctagtgtctggcattacagttacagcaatcgctttagttggttcaacagcagttgcaggtgtaattggtgccggtggtttaggaaatttagcatacttaacaggtttcactcgaaatcaaaatgatgtcattttagtatcaacagtttttattttaattattgtatttataatccaattcattggggattggcttacaaataaacttgataaacgataaattgggggtttcattttatgaaaaaattatttggtcttattttagtattaacatttgcagttgtattagcagcttgcggtaatggaaacaaaagtggcagtgacgacaagaaaataacagtaggtgcttcaccagcaccacatgctgaaattttagaaaaagcaaaaccattattagagaaaaaaggttatgaactagatattaaaacaattaacgattacactacacctaataaattactagacaaaggtgaaattgacgcaaactatttccaacatacaccatatttaaacacagagaaaaaggataaaggttacaaaatcgtaagtgccggtgatgttcacttagaacctatggctgtatactctaaaaagtataaaagtttaaaagaattaccaaaaggtgcaacagtctatgtgtctaataatccagctgaacaaggacgtttcttaaaattcttcgttgatgcaggtttaattaaaatcaaaaaaggcgtaaaaattgaagatgctaagtttagtgatattacagagaataaaaaagatattaagtttaataataaacaatcagcagaattcttacctaaaatttatcaaaatgaagacgctgatgctgttatcattaattcgaactttgcaatcgaacaaaaactaaatcctaaaaaagattctattgctgtagaaagtgcgaaagataatccttatgcaaacttaattgctgttaaagaaggacatcaagatgataagaaaatcaaagcattaattgaagtattacaatctaaagatattcaagacttcattaatgaaaaatacaatggtgcagttattcctgctaaataaatcatattaatggctcagtaacgtgatgttgctgggctttttaatttaaacaggtatttatatgatatttaggaatgagatgctattacggataaagtaaaatcctatatgcatgcgtgctactcatttattcttatttttaatttcacatggctagtgactaatacatcataaatcattagtgattctttattatttcagtcccactccctcaagttaatgatgaatctatttcgctagttataaaatgacgtcaaatcaatatcaaaaattatttaagtaaaatgtttagataatttttcagtgggtaagtattatatataacatttaattattccgaggaggcatttattatggcagacgaaagtaaatttgaacaagcaaaaggtaatgttaaagaaacagtaggtaatgttactgataataaaaatttagaaaacgaaggtaaagaagataaagcttctggtaaagcgaaagaattcgttgaaaatgcaaaagaaaaagcaactgattttattgataaagtaaaaggtaacaaaggcgagtaattttactttttattcctaatacactgcacatgccacttagtcggtataaccatcggctaggtggtttttgtattaaaaaagtggataccaaaatttattaataattattttaatgttagaaaaaaactaaataaaaactcgctaatgatatccaataatatgtatacaaaacgagacatatattgcatatgattaacgagatactgaaaatattttatcacccctaaaatgattattcattttcagcggtaattcgacctaaagtcaaacttacaataaaaccgatgataaatactactaatgaaacgaaccacatcacgatattagttggtaaacctggaaatactgcaaagagggagccaacaacaaaaccaatgattaatgcaaaagtcattagtttatgatgtgttaggaaatactggataattttgcttgaaataatgaatccagcaagcacgccaaatccgactgcaagtaatataggaagacctgcaaagttaagtttaacaacttcagatattgctagcatgaccgtaccatagacgccaaatactaataacataaatgaccctgaaatacctgggagtaacatagcactagatgcacacatacctgcaataaaatatttaataataagactagttgatagagtaagtgtttctccagcatgtttatcaccattattcattaatgtaataacaattaagatagcgataccagctataaccatcatgtaatgtttagttgtaaatgacgttttatagttagaaattttcaataaatatggaacgataccaatgattaatccaccaaagaaaaacatagttggaatatggtgttggcttaataaataattaaaaagattacttagtgatcccattgccagtaacattccaattataatggggattaaaaatgtaaaacttggccaaaaacgtcgtgagaatatgccgctaattgaagcgataaattgattgtaaatacctaacaataatgcgatagtcccaccgctaacaccaggtaccaagtcactcgttcccatagcaaaaccttttagaatattaatccatttaaattgttgcatgaataactcctttcaaacgattggaataaaatcataaatagcatcataccatattacaaatgtcctagtgaaatgataacatattttaaattcataaaatccattgagaaattatgtgcacttattatcatttatatttttaaagagagcggattagagttgtactttagagttattaaaaataataaaaagggtttaagttgtttatattaaggtataagtaagttataattaactgaacgcattattacaaagtctttttgactacaaattaaaattattataaactagttaagaaaactttatattttacggagggaatataaaatggcatcaacattagaaatcaaagacctacatgtgtctattgaggataaagaaatcttaaaaggtgttaacttgacaattaacactgatgaaatacatgcgattatgggaccaaacgggacaggtaaatcaactttatcatctgcaattatgggacacccaagctatgaagtaactaaaggagaagtacttttagacggtgtaaatattttagaattagaagttgatgaaagagcaaaagcaggattattcttggcaatgcaatatccatcagaaattacaggtgttacaaatgctgatttcatgcgttcagcaatcaatgcgaaacgtgaagaaggacaagaaatcaacttaatgcaatttattaagaaattagataaaaacatggattttctagacatagataaagacatggcacaacgttatttaaatgaaggtttctcaggtggagagaagaaacgtaacgaaatcttacaattaatgatgttagaacctaagtttgcaatcttagatgaaatcgattcagggttagacatcgatgcattaaaagttgtatctaaaggtattaaccaaatgcgtggggaaaactttggtgcattaatgattacacactatcaacgattattaaattacattactcctgataaagtacatgtaatgtatgctggtaaagtcgttaaatctggtggtccagaattagcaaaacgtcttgaagaagaaggatatgaatgggttaaagaagagttcggttcagctgaataatcttattaatacagtatccatgagatgttcatctatatatgatgaaaatgaacatttatacgaaatagtaaatttcatcaagtaggaggaaaaagttatgacaactgatattttgaacatttctgaagaacaacttgttgattattctaaagcccacaatgaaccttcttggatgacagaattacgtaaaaaagctttgaaattaacagaaactttagaaatgccaaaacctgataaaacaaaattaagaaaatgggattttgattcttttaaacaacacgatgtaaaaggtgatgtttatcaatctttatcacaattacctgagtcagtaagagaaattattgacgtagatcattctaaaaacttagtaattcaacataataatacgattgcgtacacacaagttgatgataatgcatcgaaagatggcgttatcgttgaaggtttagcagacgctcttatgaaccatagtgatttagtacaaaagtactttatgaaagatgcagtaacagtagatgaacatcgtatcacagcgctacacacggcattagttaatggtggcgtatttgtttatgttcctaaaaatgtagttgtagaacatccagtacaatacgttgtgttgcacgacgacgaaaatgcaagcttttataaccatgttatcatcgttactgaagaaagcgccgaagtcacatatgttgaaaattacttatcaaatgcatctggtgaaggaaatcaattaaatattatttctgaagtgattgctggtgcaaattcaaatatcacatatggctcagtggactatatggataaaggctttacaggtcatatcattcgacgtggtattactgaagcggatgcctcaattaattgggcactaggtttaatgaatgagggtagccaaattattgataatacaacaaatttatttggtgatcgttcaacaagttcacttaaatcagtagttgtaggtacaggcgaacaaaaaattaatctaacatctaaaatcgtacaatatggtaaagaaacagatggttatatccttaaacatggtgttatgaaagaacatgcatcgtctgtatttaatggtatcggctacattaagcatggtggaactaaatcaattgctaatcaggaatcacgtgtattaatgttatctgaacatgctcgtggtgacgcgaatcctattttattaattgatgaagatgatgtacaagctggtcatgctgcatcagtaggtcgtgttgatccagatcaactttactatttaatgagtcgtggtatttctcaaagagaagcggaacgtcttgttatacatggtttcttagatccagtagtacgtgaattacctatcgaagacgttaaacgtcaattgagagaagtaattgaacgcaaagtttctaaataatattttgaaaataaaagtttgtaatagatatagactgtcgatattggtataagactaatacaacgtcagtatttaaatgattaggatttttatttaagaaaggtcgtgaatgaagtggccgaacactcatttgacgttaatgaagtaatcaaggattttccgatattagatcaaaaagtcaatggcaaacgtttagcatatcttgattcaacagcgacaagtcaaacgcctgtgcaagtgttaaatgttttagaagattactacaagcgttataattcaaacgttcatcgtggtgttcatacattaggatcattggcaactgatggttatgaaaatgcccgtgaaaccgttcgtcgttttattaatgcgaagtattttgaagaaatcatttttacacgcggaacaactgcgtcgattaaccttgtagcacatagctatggtgatgcaaatgttgaagagggcgatgaaattgttgtcactgaaatggaacatcatgccaatattgttccttggcaacagttagcaaagcgtaaaaatgcgacattgaaatttataccaatgacagctgacggtgaattaaacatcgaggatattaagcaaacgattaatgataaaacaaagatcgttgctattgcacatatatctaatgtgctcggtacaattaatgatgttaaaaccattgcagaaatagctcatcaacatggtgcaattatcagtgttgatggggcgcaagcagcaccacatatgaaacttgatatgcaagaaatgaatgctgatttttatagttttagtggtcataaaatgcttggaccaacaggtattggcgtattatttggtaaacgtgagttactacaaaaaatggaaccgattgagttcggtggcgacatgattgattttgtaagtaagtatgatgcaacatgggctgatttacctactaaatttgaggcgggtactccattaattgctcaagcaattgggcttgcagaagctattcgctatttagaacgcataggttttgatgcaattcataaatatgaacaagaattaacgatatatgcttatgagcaaatgtctgcaattgaaggaattgaaatttatggcccgccaaaggatcgtcgtgcaggtgtaataacgtttaatttacaagatgtacatccacacgatgttgctacagccgtagatacagaaggtgtagcggttagagctgggcatcattgtgcgcaaccgttaatgaaatggttaaatgtgtcttcaacagctagagcgagtttttatatatacaacacgaaagaagacgttgatcagttaataaatgccttgaaacaaacgaaggagtttttctcttatgaattttaataatctagatcaattatatagatctgtcattatggatcattataaaaatcctagaaataaaggtgtattagataacgggtctatgacagtagatatgaataacccgacatgcggtgaccgtatacgactaacatttgatatagaagacggcattataaaagatgctaagtttgaaggtgaaggttgttcgatttcaatggcaagtgcatcgatgatgacacaagctgttaaaggtcattcacttggagaagcaatgcaaatgagccaagaatttacgaaaatgatgcttggtgaagactatgtgattacagaagaaatgggagatattgaagcattgcaaggtgtatctcaattcccagctcgtattaaatgtgccacattagcttggaaagcattggaaaaaggtactgttgctaaagaaggtaaagcagaaggtacgactgaagaagaatagaatgctgttaatcatagataattttgatattagacatataaaagtataaaaatttttataagatgtcatgtcattgttataatatggtttacatcatgaattaaaaacttacgcacgccgttgtaaatatatttttaaggagtgattgaaatggctaaaaaagcacctgatgttggggattataaatatggattccacgacgatgatgtgtccattttcagatcagaacgtggtttaactgagaatatcgttagagaaatttctaacatgaaaaatgagccggaatggatgttagatttccgtcttaaatcattaaaattgttttataaaatgccaatgcctcaatggggtggcgacttatcagaattgaatttcgatgacattacttactatgtaaagccttcagaacaagctgaacgttcatgggatgaagtgccagaagaaattaaaagaactttcgataaattaggaattcctgaagctgaacaaaaatatttagctggtgtttctgctcaatatgaatctgaagttgtttaccataatatggaaaaagaacttgaagaaaaaggtattatctttaaagatacagatagtgctttacaagaaaatgaagaattattcaaaaaatactttgcttctgtagtacctgcagcagataacaaatttgcggcgttaaactcagcagtatggtcaggtggttcgttcatttatgtacctaaaaatatcaaactagatacgccactacaagcttatttccgtattaactctgagaacatgggtcaatttgaacgtacattaatcattgctgatgaaggtgcttctgtacattacgtagaaggttgtactgcaccagtttatacaactagttctttacactctgctgttgtggaaatcattgtgcataaagatgcgcacgttcgttatactacgattcaaaactgggcgaacaatgtatacaatttagttacaaaacgtacttttgtttatgaaaacggaaatatggaatgggtagatggtaacttaggttctaagttaacgatgaaatatccaaactgtgttcttttaggtgaaggtgcaaaaggtagtacattatctattgcatttgctggtaaaggacaagttcaagatgccggtgctaaaatgattcataaagcacctaatacatcttctacaattgtttctaaatctatttctaaaaatggtggtaaagttatttatcgcggtattgttcattttggacgtaaagcaaaaggtgctcgttcaaatattgaatgtgatacattaatcttagataacgaatcaacatcagatacaattccatataacgaagtattcaacgatcaaatatcattagaacatgaagccaaggtttcaaaagtttctgaagaacaattattctatctaatgagtcgtggtatttctgaagaagaagcgacagaaatgattgttatgggattcatcgaaccatttacaaaagaacttccaatggaatacgcggtcgaaatgaaccgtttaatcaagttcgaaatggaaggtagtattggatagctttaaaccgcgttgttaagccattcttgacttccgaaaatggctattgataccattttgatactgaatataacaaaaagccacattactgtggctttttttgttttataactaaatcggattgatagataagctttgtacttatttatatcagttcgattttttgattggtgtaaaaaataatcattgatggtggataaagcgacaacacaaatacaacatgattgtggcattagagtgctggtctttattaaattaattgaaagctacatcaaatattctttagataattcgatattagttcgattaagattcgttgtataagtgagttaaaataagaaaactattaataatattaagttcactacagatgttgctaatggaccataagttttaaagacatcttcacttttataaccaacaatcgcatctaaaaattgaactaagatcattgcaatggatatagttatcaaaaatatagcactatgaatgactaaagaaaaaatagctaataaaaataaaggtaagcttcgactaagtgcataatatgcatttatattatggctagatgcacatgcttgaattgaataacctaaacttacactggcactgattattgtaaatattgctaaaacaaaatacatgttaatccttctttctatatttggatataaacaagtacttgtctaaagttatttaaaagataattagaataaatttatgagaaactggttgttatcattataatggtttcaaatgattataactatgtcataaactgaatttgttgaaatttttcattatgcaaatttattaataacaaacagctcgaactatagcatcattttactaatgaatgcattaaagtaactatgactaaaaatgcatattaattatcattattaagactattatatataatgaattttaactggtttattaaacgagaacgtcgggaattaagtaactacaataaaaataagatatgacaataaggagactacacgcgtgatcattgccataattatattgatatttatttcgtttttcttttcaggaagcgagacggcattaacggctgccaataaaacaaaatttaaaactgaagctgacaaaggtgataaaaaagcaaaaggcattgtaaagttacttgaaaaaccaagtgagtttattacaacgattctaattgggaataatgtcgcgaatattttattaccaacacttgttacaattatggctttacgttgggggattagcgttggtattgcatcagctgttttaacagttgttatcattttgatctccgaagtgattcccaagtctgtcgctgcaacatttccagataaaataacaaggcttgtatatccaattattaatatttgtgtcattgtgttccgtcctatcacattacttttaaataagttgacggacagtattaatcgaagtttatctaagggccaacctcaagaacatcaattttcaaaagaagaatttaaaacaatgttagcaattgctggacatgaaggtgctttaaatgaaattgagacgagtaggttggaaggtgtcattaattttgaaaatttaaaagtaaaagatgtagatacaacacctagaattaatgtgacggcatttgcttcaaatgcgacatacgaagaagtttatgaaacggttatgaataagccatacactagatatccagtgtacgagggagatattgataacattattggggtgtttcattctaaatatctgttggcttggagtaataaaaaagaaaatcaaattacaaactattcagctaagccattatttgtgaatgaacacaataaagctgaatgggtattacgtaagatgactatttctagaaaacatttagcaattgtgttggacgaatttggtggtactgaagcgatagtgtcacatgaagacttaattgaagaattattaggtatggaaattgaagatgagatggataaaaaggaaaaagaaaaactttctcaacagcaaattcaatttcaacaacggaaaaatcgcaacgtatctatataaggagcgaacagctatgtggaataagaatcgacttactcaaatgttaagtattgaatatccaattatacaagcaggtatggcaggaagtacgacaccgaaattagttgcatcagtaagtaacagtggtgggttaggcacaataggcgcaggttactttaatacgcagcaattggaagatgaaatagattatgtacgccaattaacgtcaaattcttttggcgtaaatgtctttgtaccaagtcaacaatcatataccagtagtcaaattgaaaatatgaatgcatggttaaaaccttatcgacgcgcattacatttagaagagccggttgtaaaaattaccgaagaacaacaatttaagtgtcatattgatacgataattaaaaagcaagtgcctgtatgttgttttacttttggaattccaagcgaacagattataagcaggttgaaagcagcgaatgtcaaacttataggtacagcaacaagtgttgatgaagctattgcgaatgaaaaagcgggtatggatgctatcgttgctcaaggtagtgaagcaggtggacatcgtggttcatttttaaaacctaaaaatcaattacctatggttggaacaatatctttagtgccacaaattgtagatgtcgtttcaattccggtcattgccgctggtggaattatggatggtagaggagttttggcaagtattgtcttaggtgcagaaggggtacaaatgggcaccgcatttttaacatcacaagacagtaatgcatcagaactactgcgagatgcaattataaatagtaaagaaacagatacagtcattacaaaagcgtttagtggaaagcttgcacgcggtatcaacaataggtttatcgaagaaatgtcccaatacgaaggcgatatcccagattatccaatacaaaatgagctaacaagtagcataagaaaagccgcagcaaacatcggcgacaaagagttaatacatatgtggagtggacaaagcccgcgactagcaacaacgcatcccgccaacaccatcatgtccaatataatcaatcaaattaatcaaatcatgcaatataaataatcgaccgcaatccacaaaagcacaagcacccccaaacattattttagtgcttgccatttttgtggattgcgtttctattttaccaatttaatcaaacgaaaacatcaagctgaagatcgccgaaagattttaatcaagcaaaaacatcaaactaaagttcgctgaaatgattatgataaaagttatatggtatgatgacattggtgatatatatgataaacatcggattaacaggttggggtgatcactattcattatatgaagatttagaacgccaaaccgataaacttaaaacatatgctggacattttccggttgtcgaattagatgcgacatactatgcgatacaaccggaaagaaatatattgaaatggataaaagaaacgcctgatacatttgaatttgtggtcaaaattcatcaagcactcacattgcatgcagactacaaaacatttgcagatacaaggcaagaactatttgatcaatttaagaatatgttagagcccttacatacacagaaaaaattagcaatggtattggttcaatttccgccatggtttgactgcaatgcacaaaatatcaaatatattttgtatgtaagacagcaattacaagcatttccaatgtgtgtagaatttaggcatcaatcatggtttagtgatgcatttaaagaacaaacattggcatttttaacagaacatcaaatcattcatgcagtagttgatgaaccacaagtgaaagatggcagtgtacctttagtcaatcgaatcacaaatgaaattgcgtttgtacgttatcatggacgtaatcattacggttggactaagaaagatatgtcagatcaagaatggcgcgatgtacgctatttatatgattataatgagcaagaattaatagacttggcacaaaaggcacaaatattagcacaaaaagctaagaaagtttacgtcatatttaacaataattctggtggtcatgcagcaaataatgccaaaacatatcagcgattattgaatatagaatatgaagggttagcaccacaacaattaaaattattttaagaggcgacgactatgttattaacaattacattattagttttaatcggaggtttgtcagcgattatagggtctatcgtaggcattggaggcggtattattatcgttccaacaatggtttacctcggtgttgaacatggattactacataatattacaacacaagtagcgatagggacgtcttcagtcattctaattgtgacaggactttcttcatcacttggatatttaaaaacaaaacaagttgatattaaaaatggttccatctttttatttggactattaccaggttcattgcttgggtccttcattagtagatatttaacatttgagtcatttaatttatattttggtatctttttaattttcgtagccattttattaatggtaagaaataagattaaaccgtttaaaattttcgataaacccaagtatgaaaagacttatgtagacgctaaaggtaaaacatatcattatagtgttccaccattgtttgcttttattacaacgtttttaattggtatattgacaggtttatttggtattggaggtggcgcactaatgacgccactaatgcttattgtatttagatttccacctcatgtagctgttggaacaagtatgatgatgattttcttttcaagtgtcatgagttctatagggcacattgctcaaggtcacgtagcttggggttatgcaatcattttaattatttctagttattttggtgcgaaaatcggtgtcaaagtgaatcaatcaattaagtcagatacggtagtaacattattgagaacagtaatgttgttaatgggtatatatttaattattcgtgcgttgatttaatacaactttaaaaggaggacgtcaatttgaggcttacaatttatcatacgaacgatattcatagtcatttacatgaatacgaacgcattaaagcatatatggcagaacatcggccacgacttaatcatccttctttatatgttgatctaggtgatcatgtagatttatccgcacctataactgaagcaactttaggtaaaaagaatgtggcattactaaatgaagcaaaatgtgatgttgcaacaatcggtaataatgaagggatgaccatttcatacgaagctttaaatcacctttacgacgaagcaaaatttatagtgacatgtagcaatgttatagatgaatcaggtcatttaccaaataatatcgtttcttcttatattaaggacatagacggtgtgaaaatactattcgttgcagcgacagcaccttttaccccattttatcgtgcactaaattggattgttaccgatccacttgaatctataaaagaagaaattgaacttcaacgaggtaaatttgatgtattaatcgtgctaagtcattgtggcattttcttcgatgaaacattatgccaagaattgcctgaaattgatgtcatttttggtagtcatacgcatcattattttgaacatggtgaaatcaataatggtgtactgatggcggcagctggaaagtatggtaattatcttggagaggttaatttaacttttgaggcacataaagtagtacataaaactgcaaagattattcctttagaaacattacctgaagttgaaacttcatttgaagaagaaggaaaaacgttaatgtccaattcagtaattcaacatccagtagtgcttaagcgtagtatgaatcacataactgaagctgcatacttattagctcaaagtgtttgtgagtatacacatgcacaatgtgccatcatcaatgctggcttactcgttaaagatattgtaaaagatgaagtgacagaatatgacattcatcaaatgttaccgcatccgattaatatggtaagggttagactttttggtgtgaaattaaaagagattatagctaaaagtaataaacaagaatatatgtatgaacatgcacaaggtttgggtttcagagggaatatatttggaggatatattctttataatttagggtacattcattctacagggcgttactatctgaatggagaagaaatcgaagacgacaaagaatatgtactaggtacgatagatatgtatacgttcggtcgttatttcccaacattgaaagaattaccaaaagagtatttaatgccagagtttttaagagatatatttaaagaaaaattattggaatattaaaaagtaagattattggattttcatttgtcatgaatttcgatataatgtttaaagatacacttaacaggagggtatgtgttgttatggcgacaaaaaacgaggaaatattacgtaaaccggattggttgaaaataaaattaaataccaacgaaaactatacaggacttaagaagatgatgagggaaaaaaatcttaatactgtatgtgaagaagctaaatgtcctaatatacatgaatgttggggtgcacgtcgtacagcgacatttatgattttaggtgccgtatgtacaagagcttgtcgtttttgtgcggttaagacaggtttacctaatgaacttgatttaaatgagcctgaacgtgtagctgaatcagttgaattaatgaatttgaaacacgttgttatcactgctgttgcgcgtgatgatttaagagatgctggttcaaatgtttatgctgagacagtacgtaaagttagagaaagaaatccatttacaacgattgaaattttaccatcagatatgggcggggactatgatgcgttagaaacattaatggcgtcaagacctgacattttaaaccataatattgaaactgttcgtcgcttaacaccgagagttcgtgcgcgtgcgacttacgacagaacattagagtttttacgtcgttcaaaagaattacaaccggatatcccaactaaatcaagtattatggttggattaggtgaaactatagaagaaatttatgaaacgatggatgatttacgtgcgaatgatgtagatattttaacgattggtcaatatttacaaccttcacgtaaacatttaaaggttcaaaaatattacacgcctttagagtttggtaaattaagaaaagtggcaatggataaagggtttaaacattgccaagctggacctttagtacgtagttcttatcatgcggatgagcaagtaaatgaagctgctaaagaaaagcaacgccaaggtgaggcacagttaaatagttaatatttaaccattaataaggcataaaggcttagtttgtacaaaacgaacgtgtcatagaagtaatcattatttttatgaaacactaaaagtataaactgagcctttcattgtcatagataggtgaagaatttgataaaagtagatcaacattactttgaattaatagaaaattatcgcgaatgttttaatgaagaacaatttattgctaggtattcagatattttagataaatatgattacatagttggtgactatggttacgatcaattacgattaaaaggtttttacaaagattctaataaaaaagcagagatgagtaaacgtttttcaaatattcaagattacatatttgaatattgtaactttggttgtccttactttgtattaagacatttgtctaaacaagaggttaaaaagttaatcgaagaagttcatccgtctgatgtgatagatgacgacaataaacttcaagatgtgaagattaagccaaccattcaagatactgaacattaataaaacccttagctagattgaaaatgggaatcatgcaattcaagcatggacctgtaatctagttaggggtttttatctttaatgaatgacttcatttaaatactcagtaatttcatcgccttcttcagcatttacacctaaaatatgagcgatatagccttcttcttttaaatcatcagtaccgataataccgaatttatttgtttgcatattaagtacgagtgtcttaccataatgtctatttgtatggactaacatcaaatcatatcgactatgctcgccaacaaaaccaacaaactgaacttgactctcttcgttgtcatcatataaatacatatcaatcattttgtagcgactccttttaaaagtagtaaagttagtataacgacaaatgaagtatactgcaaaattatgataatatataagtgagaggtgacaaggaatgtattttgtagacaaagataaactaactcagaaattagcctatttacaagcattaactgatgattatcatgagagcaagcacaatcattatgcatttgaacgcattgctcaaatgttgatagaatcatcggtagatatagggaatatgattatcgatgcatttattttaagggatcctggtaattataaagatgtgattgatatattagaactagaaaatgttattactaaagaaacacagcaggcgattaataaaactgtcggtattcgtaaacaatttacatatgattacacagccttagatattaagattatcatgccaatgtttgatgacgcattaccttattacaaacaatttattacagaagtaacgatatttttacatcaagaaaatgtaccagtaacagcttttggtaaaggagaaaatcaataatgaaacagtataaagcgtatttaatcgatttagatggcacaatgtatatgggaacagatgagattgatggagcaaaacaattcatcgattatttaaatgtaaaaggcattcctcatttatacgtaactaataattcaacaaaaacacctgagcaagtaactgaaaaattacgtgaaatgcacattgatgctaaaccagaagaggttgtaacgtcagcgttagccactgctgattatatttcagaacaatcaccaggagcatcagtatatatgttaggtgggagtggtttaaatactgcgttaaccgaagcgggacttgtcattaaaaatgacgagcatgttgattatgtagttattggacttgacgaacaagttacatatgaaaagcttgcgattgcaacgttaggtgtaagaaatggtgcaacatttatttctacaaatcctgatgtatcaattcctaaagagcgtggtttattacctggtaatggtgctattacaagtgttgtaagtgtatcgacaggtgtatcgccacaatttattggtaaaccagaaccgattattatggttaaagcattagaaattttaggattagataaatccgaagttgctatggtaggcgatttgtacgataccgatattatgtctggtattaacgtaggtatggatacgattcatgtacaaacaggtgtatctacgttagaagatgtgcaaaataaaaatgtgccaccaacgtattcttttaaagatttaaatgaagcaatagctgaattagaaaaatagatatagtcattttataaagtaggtgaattgatttggtaaaaatagttgtttcgaggaaaattccagataaattttatcaacaattaagtaaacttggtgacgttgttatgtggcaaaaatcattagtgcctatgcctaaagatcaatttgtgacagcacttcgtgacgcagatgcttgttttattacattaagtgaacagatcgatgcagaaattttagcgcaatcaccaaatttaaaagtaattgcgaatatggctgtaggatatgacaacatcgatgttgaaagtgcaacagcgaataacgtggttgtcacgaatacaccaaatgtacttactgaaacaactgcagaattaggatttacattaatgcttgctatagcacgccgtattgtagaagctgaaaaatatgtagaagcagatgcatggcaaagctggggtccttatttattgtcaggtaaagatgtcttcaattcaactattggaatatatggtatgggagatattggtaaagcttttgcaagaaggttgcaagggtttaatactaatattctttatcataatcgatcaagacataaagatgcagaggcggactttaatgcaacatatgtttcttttgaaacgttgttagcagaaagtgattttatcatctgtacagcgccacttacaaaagaaacacatcataaatttaatgctgaagcatttgaacaaatgaaaaatgatgcaatttttattaatatcggtagaggacaaattgtagatgaaacagcattaatcgatgcactagacaataaagaaattttagcatgtggtttagatgtattagcaaatgaaccgattgatcatacacatccattaatgggacgtgataatgttctgattacaccacacattggtagcgcatcagtaacaacacgggacaatatgattcaattatgtattaataatatagaagcggttatgacaaatcaggtaccacatactccagtaaattgaaaataagtatggtttttaatcattggtaaaacaagcaaagcaattgttaaatatgttatgcttgacttgcgaatgtatatatttgcgctgatgataattcaataacattataaactcgtcatattaatgtgatgagtttatttgattttgacgtatataacaaaattgttatatagactgtaattgtttattgtttaaataacctttaaaatgaatgatgttctcaacaaagtgtatcatttacaataattgagtgatgacaaccaattactatgttgaatctataaaattaaaattgaatttcattatgaatatcgatataatgaattgtaaaaaacaaattttaaaacgtattttatattgaacggtctttataaaggcgtttttactaagaactttaagaggtgcaatatgaaatctaaaagtaaacagccacctaataaatatgttgaagcattcaaaccatatttattaacactattgtatttggcaatatttattactttatatttaatttatggcagtggcgacacacacaataacttcatttataatgagttctaatgagggagacttaatatgacagatattattaacaagctgcaagcgtttgcggatgcaaatccacaaagcattgctgttagacacacaactgatgaattaacttatcaacagttaatggatgagtctagtaaattagcacatcgattacaaggtagtaagaaaccgatgattttattcggtcacatgtcaccatatatgattgttgggatgattggtgccattaaagcaggatgtggatatgtacctgtagacacttcaattcctgaagaccgtattaaaatgattattaacaaggttcaaccagagtttgtatttaatacgactgatgaatcatttgaaagtttagaaggcgaagtatttacaatagaagatattaaaacatctcaagacccagtaatttttgatagtcagattaaagataacgacacagtatacacaatctttacatctggttctactggggaacctaaaggtgttcaaattgaatatgcaagtttagttcaatttactgagtggatgttagaacttaataaatcaggaaatgaacaacaatggcttaaccaagcgccattttcatttgatttatctgtaatggctatttatccatgtttagcatcaggcggtacattaaatcttgtagataaaaacatgattaataaacctaaattattaaatgaaatgctaacagcaacaccgattaacatttgggtatcaacaccatcatttatggaaatgtgtttattattaccaacgcttaatgaagaacaatatggtagtcttaacgaattcttcttctgtggtgaaattctacctcacagagcagcaaaagcgttagtaaaccgtttcccaagtgcgacgatttacaacacatatggtccaactgaagctacggtagcagttacaagtattcaaattacacaagaaatcttagatcaatatccgacattacctgttggcgttgaaagaccaggcgcaagattatctactacagatgaaggtgaacttgttatcgaaggtcaaagtgtaagtttaggatacttaaaaaatgaccaaaaaacagctgaagtatttaatttcgatgacggtattcgtacatatcacactggtgataaagcgaagtttgaaaatggtcaatggttcattcaaggtcgtattgatttccaaatcaaattgaatggctacagaatggaattagaagaaattgaaacacaattacgccagtctgagttcgtaaaagaagcgattgttgtacctgtatataaaaatgataaagttattcatttaattggtgcaattgtgccaacgactgaagttacggacaatgcagaaatgactaaaaatattaaaaatgacttgaaatcacgcttaccagagtatatgattcctagaaagtttgaatggatggaacaattgccattgacttcaaatggtaaaattgacagaaagaaaattgcagaggtaattaacggatgattccatatggtgattttacattcttcttaattgctttaattgcattattaccagtcattatacttggatttttaggtaagcgaagttacatttataatggcgtagttacagcatttatgattgtgttaatcttttcttctgataaacataatctgtttgaccaaaagtatttaagtgttcaattaattagttttattatttacgtcgtatggcaagttttattgataatgttttattatcattcaaaaccaaaaaataattcattttcaaaatttgtaactgtaatggttttatcaatattgccattagcacttgtgaaagtgttacaaagtacatggttaggtggacatcagattcacttccatgaaagtaaattaattgaatttgttggtttcttaggaatttcttatgttacattcaaaagtgtgcagttaattatggaaattcgtgatggttctatcaaagaaattaaagtatggaaattaattcaatttatttcattcttcccaacgatttcatctggaccaatcgatcgttacaaacgtttcgttaaagacgataaaaaagtaccaacaggcaatgaatatcgtgaattagtattaaaagcaattcacatgattatgcttggtttcttgtataaatatattgttgcttactttattaacacatatgcaatcatgccgttacaattagacttacatggctttgtcaatttgtggttatatatgtacgcatacagcttatatttattctttgactttgcaggttatagtttatttgcgatagcatttagttatttattcggtattaaaacaccaccaaacttcgataaacctttcaaagcgaaaaatattaaagatttctggaatagatggcatatgacattatcattctggttcagagattgtatttacatgagatctttattctacatgtctcgtaaaaaattattgaagagtcaatttgcaatgtctaacgtggcattcttaatcaacttcttcataatgggaatttggcatggtatcgaagtgtattacattgtttatggtttataccatgcagcattgtttataggttatggctattatgaacgttggcgtaagaaacatccgccacgttggcaaaatggtttcacaacagcacttagcattgtgattacattccactttgtaacatttggctttttaatcttctcaggtaaacttatataataaaggagaatttaattatggaatttagagaacaagtattaaatttattagcagaagtagcagaaaatgatattgtaaaagaaaatccagacgtagaaatttttgaagaaggtattattgattctttccaaacagttggattattattagagattcaaaataaacttgatatcgaagtatctattatggactttgatagagatgagtgggcaacaccaaataaaatcgttgaagcattagaagagttacgatgaaattaaaaccttttttacccattttaattagtggagcggtattcattgtctttctattattacctgctagttggtttacaggattagtaaatgaaaagactgtagaagataatagaacttcattgacagatcaagtactaaaaggcacactcattcaagataagttatacgaatcaaacaagtattatcctatatacggctctagtgaattaggtaaagatgacccatttaatcctgcaattgcattaaataagcataacgccaacaaaaaagcattcttattaggtgctggtggttctacagacttaattaacgcagttgaacttgcatcacagtatgataaattaaaaggtaagaaattaacatttattatttcaccacaatggtttacaaaccatggtttaacgaatcaaaactttgatgctcgtatgtctcaaactcaaattaatcaaatgttccagcagaaaaacatgtctactgaattaaaacgtcgttatgcacaacgtttattacagtttccacatgtacacaataaagaatacttgaaatcttatgctaaaaaccctaaagaaactaaagatagttatatttctggttttaaagagaatcaattgattaaaatagaagcgattaaatcattgtttgcaatggataaatctccattagaacatgttaaacctgctacaaaaccagacgcttcttgggatgagatgaaacaaaaagcagttgaaattggtaaagctgatactacatcgaataaatttggtattagagatcaatactggaaattaattcaagaaagtaagcgtaaagttagacgtgactacgaattcaatgttaattctccagaattccaagatttagaattacttgtaaaaacaatgcgtgctgctggtgcagatgttcaatatgtaagtattccatcaaacggtgtatggtatgaccacattggtatcgataaagaacgtcgtcaagcagtttataaaaaaatccattctactgttgtagataatggtggtaaaatttacgatatgactgataaagattatgaaaaatatgttatcagtgatgccgtacacatcggttggaaaggttgggtttatatggatgagcaaattgcgaaacatatgaaaggtgaaccacaacctgaagtagataaacctaaaaattaaaatacaaatagcacataactcaacgattttgattgagcgtatgtgctatttttatattttaaatttcatagaatagaatagtaatatgtgcttggatatgtggcaataataaaataattaatcagataaatagtataaaataactttcccatcagtccaatttgacagcgaaaaaagacaggtaataactgattataaataattcagtattcctgtctttgttgttattcataatatgttctgttaacttaatatctttatattagaatacttgttctacttctattacaccaggcacttcttcgtgtaatgcacgctcaataccagctttaagagtgattgtagaacttgggcatgtaccacatgcaccatgtaattgtaatttaacaataccgtcttccacgtcaatcaatgagcagtcgccaccatcacgtaataaaaatggacgaagacgttcaataacttctgctacttgatcaaacatcgttgtatcttcagtaggcatcaggcaagtctcctttcgagagatgaatttgataatctttattagtatattataatagatagtgtaataaaaatctatcaaaccaatgggggataaatatatggagcacgtgagtgtggtagtttatggggcagatgttatatgtgcaagttgcgttaatgcgccaacatcgaaagatatttatgactggctacagccgctattaaaaagaaaatacccaaatatatcatttaaatatacgtatatagatattacaaaagataatgacaacttaacagatcatgatttacaatttattgaaagaatagaacaagatgaactattttatccattaattacaatgaacgatgaatatgtagcagatggttatatacaaacaaagcaaatcactcgatttatagaccaaaagcttgtgaatgaataatatacacataactaaaagcaatgtcagtaatagtgtgaactgacattgctttttaattttaaccattatgatatttatataaccaaagtacgccggattttaaaatagaagcgagtcgtcctgttacagtgcggtccatgatatatgcaaaaccttgcttatctcctaatgacccaacgataccttgtacctttagttccggcattttgtcaggtaatggttcatttagccattgctttttaagcacatcggcaatttgatcaccttgaacttcggctaactgagcacttggcgcatgtggtaaatcagcacaatcaccaactacatagacgttacgatatgttggtacttgatgatactggttaactatcacgcgtccattactatttatatcaatcggcaagttacgaacaacttcaacaggttgaattcctgctgtccatacaactaaatcaatatctttaggttcatcacagttatatattttaccaggttcaactttattaatatttgaatttggaacaacggtaacattatttttggcgaaccatttcgcaacatacttacttaatttttctggaaaatttcttaaaattcgcggcccacggtcataaagatatatttccaagtctgatctactttctcttaattcgctggcaagttctatgccgcttaatccagcaccaacgataccgactttagcaccttctggtagttcactaatactatggaaagtatcccgagcctttgagagtgtttgaatactatgtgtatattcttcggctcctggaacgttatgatatttatcttcacatcctaaaccaatgattagctcatcataatcaattttagaattaccgactgagacaatttgagcatctaaatctatgtcgttaatttcaccataaactgtattcacttgtggatgattagggaatttcatacgaacatctttatctgatttcgtgcccgcagctaaagcataaaattctggtttcaatccatgaaatggcatacgatcaactaatgtgactgtataatcttgtggtaaagaagtagttaaaatgcgtgacatgatacgcatattaccatatccgccgcctaacaaaactaagtttttcataatgaagtaccccttttatatgttaatatttactttaattttgaaaagatcaaagtgcatagatatatttgttaatgaacagttataaaatgcaagtgtctttgattcatcaataacccctaaaaaagtaaatatgtatttatatgcttattatatatttttttgaaaatgactacaaataaatatttgtactaactaaggcactattacataactgggataagaaacatcagttgttgctaattgagcacatcatgttaaaataccagttttaaaatgctataatattgtaacaaatgaaataagaaggtgaagtatgaatccgatcgtagaattttgtctctctaacatggcaaaaggtggagattatgtttttaatcaactggaaaatgacccagatgtcgatgtgttagagtatggttgcctgacacattgtggtatatgttcagccgggttgtatgctttagtaaatggtgatattgttgaaggtgattcgccggaagaattattacaaaatatatatgcacatataaaagaaacttggattttttaaggaggagttatcatgccaacagttatattaacagaagcagctgcttacgaagtaaaagatatgcttaaagcaaatgaaatgccagatggctatttaaaaattaaagtgaatggtggcgggtgcactgggttaacatacggtatgggtgcagaagaagcgcctggggaaaatgatgaagtcttagaatactttggattaaaagtattagtagacaaaaaagatgcacccgtattaaatggtacgactattgattttaagcaatcattaatgggtggcggtttccaaatcgacaatcctaatgcaattgcttcatgtggctgtggtagttcatttagaactgcaaaagttgcaggtaatcctgaaaattgctaataaaataactttttaatggttaacccaatttttgggatacaaattgatatcaataacgattaaggacatatttgattatgtcctatttttgcgtaaagatattttgttttattaaaaagcttattgaaaattaagaatctgactataaatagtattttaaatgatcgtgatagcggatacatttttaatcgaaatcaggctacgaaaaaattaattaattttttcacaatctgactgaatcttgcttgaaaatataacataaaagctatagaattagtattggattaaaaatgtcttttttgtgaacatcacaggtttttacataatttaaaagacttaaataacaaaatgatgataaactagtatacattgtggtaaaagtagtaatgaccagttgttactagtaattatcagcatttggttaaaaaaatatgaaagcttaggtgaaattaaatggctcaagatcgtaaaaaagtacttgtacttggtgctggttatgcaggtttacaaactgtaactaaattgcaaaaagcgatatcaacagaagaagcagaaattacgcttattaataaaaatgaatatcactatgaagcaacatggttacatgaagcatcagcaggtacactaaactatgaagatgtattatatcctgtggaaagtgtcttgaagaaagacaaagtgaactttgttcaagcagaagtaacaaaaattgaccgtgatgctaaaaaggtagaaacaaatcaaggtatttatgactttgatattttagtagtagcattaggtttcgttagtgaaacattcggcatcgaaggtatgaaagatcatgctttccaaattgaaaatgttatcacagcacgtgaattatcacgtcatatcgaagacaaatttgctaactatgcagcatcaaaagaaaaagatgataacgatttatctatcttagttggtggtgctggattcactggtgttgaattcttaggtgaattaacagacagaattcctgaattatgtagcaaatatggtgtggatcaaaataaagttaaaatcacttgtgttgaagcagcacctaaaatgttaccaatgttctcagaagaattagttaaccacgcagttagctacttagaagaccgcggtgttgaatttaaaattgctacaccaatcgttgcttgtaacgaaaaaggttttgtagttgaagtagatggtgaaaaacaacaattaaatgcaggtacttcagtatgggcagctggtgtacgtggtagtaaattaatggaagaatcatttgaaggcgttaaacgtggacgtatcgttacaaagcaagatttaacaatcaatggttacgacaacatttttgttattggtgactgttcagcgtttatcccagctggagaagaacgtccattaccaactacagcacaaattgcaatgcaacaaggtgaaagtgttgctaaaaacattaaacgcatcttaaacggtgaatcaactgaagaattcgaatacgttgatcgtggaactgtttgttctttaggttcacatgacggtgtaggtatggtatttggtaaacctatcgctggtaaaaaagcagcattcatgaaaaaagtgattgatacacgtgcggtattcaaaatcggtggtatcggtttagcattcaaaaaaggtaaattctaggctttaaataaagtttcagctaaacacataaaattaaattattcatttataaagtccttcagtgtcactgaagggctttattgttgtacaatttgaagtgagtaacatatcaaatctaaggaggtacattatgaattttaaattaaataacacactaagcaacgaaataaatacattgattattggtataccagaacatttaaatcagttagagcgcattagttttaatcatatcgatattacagaatcacttgaaagactaaaacatcaacatattattggtagtaaagttgggaagatttatacaactgcatttgatgtacaagatcaaacatatcgtttaattacagttggtttaggaaacttaaagacacgtagttatcaagatatgttgaaaatatggggacatcttttccaatacataaagtcagaacacattgaagatacgtatttacttatggattcatttatttcaaaatatgatcagttatcagatgtattaatggcatgcggtattcaaagtgagcgtgcaacatatgaattcgatcattataaatcaagtaagaaggcaccgtttaagacgaatttaaaccttattagtgaatcattaattgaattagattttattcatgagggtatcagtattggccaatccattaatttggcaagagactttagtaatatgccaccgaatgtattaacaccacaaacatttgcagaagatattgttaatcattttaaaaatacaaaggtcaaagtagatgttaaagattatgacactttagtttctgaaggattcggacttttacaagcagtaggtaaaggtagtaagcataaaccgagattagtaaccatcacatataatggcaaagacaaagatgaagcaccaattgccttagttggtaaaggtataacgtatgattctggtggttatagtattaaaacgaagaatggcatggctacaatgaagtttgacatgtgtggcgctgcgaatgtcgttggtatcattgaagcggctagtcgtttacaactgcctgtaaatattgtcggagtgcttgcgtgtgctgaaaatatgataaatgaagcatcaatgaagccagatgatgtatttacagcattaagtggtgaaactgtagaagtaatgaatacagacgctgaaggtagattagtccttgcagatgctgtgttttatgcaaatcaatatcagcctagtgtgattatggactttgctacattaacgggtgcagcaattgttgcactaggcgatgataaagctgctgcatttgaatcgaatagtaaagtgatattaaacgatatattacaaataagttctgaagtcgatgaaatggtatttgaattaccgattactgcaaccgaacgtgcaagtattaaacacagtgatatcgctgatttagttaaccatacgaatggacaaggtaaagcgctatttgcggcaagttttgtaacacattttagtggtcaaacacctcacattcatttcgatattgcaggtccagcaacgactaataaagcttcatataatggtccaaaagggccaacaggatttatgattccgacgatagtacaatggttaaaacaacaataatttaattatttgcctgatacaacttgtgtcttgatatacatttctaatttaactcttgaaagtataaaggatcgcattgtatcaggcattttcattgttgtaagaaaatataaatcgcatatccttgtgagcataaatcaacttgactagcattgcaaaaaaatattataagcatatgttcattcagtcaacgactactaatattgcattttagaacttaggattttgattggtgttccaagcttgtaaaattgtttaatttaatgaaagctaaaattattttaagaaagacaattaactaaaaaataaagattattggtatagtttgctattgacaggtgttaaagctactgatactatgtagtctataaacgctttagttcgatagagtgataaaggatggttgtcatatgataaatgcagtagtaatagcagtaattttaatgattgtgctatgtttatgtcgattaaacgtagttataagcttatttatcagtgcgctagttggtggcttaatttcaggcatgagcattgaaaaagttataaatgtatttgggaaaaatatagtcgatggtgctgaggtagcattaagctatgctttattaggtggatttgcagcattaatttcatacagtggtatcacagactatttagtaggaaaaattataaatgcaattcacgctgaaaatagtcgatggtcaagagttaaagtcaaagtgacaataatcattgcattattagctatgagtatcatgagtcaaaacttaattcctgtacatattgcattcattccaattgtcatcccaccattgttaagtctgtttaatgacttaaaaatagatagacgtttaatcggtttgattatcggttttggtttatgtttcccgtatgtgttattaccatatggattcggtcaaattttccagcaaattattcaaagtggctttgcaaaggcaaatcacccaattgagtttaatatgatttggaaagcaatgcttattccttcaatggggtatattgttggcttacttatcggtttatatgtatatcgtaaaccacgtgaatatgaaacacgtaaaatttcagatagtgacaatgttacagagttaaaaccatatatcttaatagtaacaattgtagcaatactagctacatttttagtacaaacatttacagattcaatgatttttggtgcactggcaggggtactcgtattctttatttcacgtgcatataattggtatgaattagatgctaagtttgttgaaggtattaaaattatggcttatattggtgtagttattttaacagcaaatggatttgctggtgtaatgaatgctactggtgatatagatgaattagttaaaactttaacaagtattactggtgataataaattatttagcattatcatgatgtatgtgataggtttaattgtcactttaggtattggatcatcatttgcaacaattcctattatcgcatcattattcattccttttggagcgtcaattggactagatacaatggcattaatcgcattgattggaacagcgagtgcattaggtgactcaggttcgcctgcaagtgattcaacattaggaccaactgcgggattaaatgttgatggccaacatgatcatatacgtgatacatgtgtaccaaacttcttgttttataatattcctttaatgattttcggtactattgctgctatggtactataagcataaagaggtgaaaatatgactcatttattagagacatttgagatgtcaatagatcaccaggaagatggtttagttgttatttctatgcctgttactgataaagtaaaacaaccatttggatatttacatggtggggcttcgattgctttaggtgaaacagcatgttcattaggatctgctaatttaattgatacaaccaaatttattccattaggtttagagatgaatgctaaccatattcattctgctaaagatggtcgtgttactgcgacagctgaaattattcatcgaggtaagtcgacacatgtatgggatataaaaattaagaatgacaaagaacaattaattacagttatgcgtggtacagttgctattaaacctttaaaataaaagaactgctagctgaaatgttatgagatattcataactacggctagcagtttttttatgcgctatattgttgtagttttagaaatgcttgttcaatgcgttcggcagctttacggccacccataacatttctaccaaatggtcctaattctaagtctgcaaagcatcctgcgacaaatagatttggtatccattctaatttttcggaaataacagggtaattacattcgttgataggtgcatcataattttgtattaattgcttaataagtggttgtgacataaaatcttgttcaaaaccagttgcaaccataatctgttgatatggaacagaatcattttcagtgttaattacaccaccactaatttgagtgataggtgttttatgcacatttatacgaccatttttaatatgttttttaaggcgtaagtacagttcgtgaggcattgatcctttatgacgttcgcgttgtacaatggcatttctttcaggcatgcttttagtacttaaaaatgaagacatatttttcggacctaaccaaccaggatcagcatcaaagtcatgtatttcaatatctttatttagccataaatgaatctttttatcgttatcatgatttaacaatttaagtgcaagatgtgcagcagtaatgccgctaccaacgatatgatcggtcttatcatatactacttgatcaagttctttctcgaagatatgatttacattctgtttgtcttttaaaatgtcaggcataaacggaatatttgtactgcctattgcaataacgacgcaatctgtagtgataatttgtccatcttctaacttgatatgccatttgtcttcttgtttatctaaagtttgaactaaaccttgaaccaagcaatcctctaattgatattgtttagaagcatgtgcaatatgatccataaacattgtcaattcaggtcgttgataaggaccataaaaagcatttgtatattggtgctgtttagcgaattgttttagatggaacggttgtggatgtacgtgatgtacaatcggtgatcttaaataaggcatttctattcgatttgtatatgagttaaacctttggcaaaaagtttcgtgtgggtcaatgattgttaatcggtctgttgttaatccgcttgataatagtttttgtgcgattgcagttccctgtatgccaccgccgataattgtccaatgcataataaaacctctctctttttaaaacgtaatagttacgatttataattattattatcataatacataacgacatgaaaggcaattaaattaaagagatatatgtagatagggcgaatctgtagtcaaagaaaaaatcattgaaaaagaggtaacaatgtcaaaagaaaacagcagtaaaatcattcctaatttggaatcatcttactgctgtttgttgttgatttatattcatgattttgttatataatctacaattttgtgtcttttaagtcttccgaaatttcatcgactttagtctttttagtataaggcgttttaatattatatgctgctttcataatcatatgacttgaaagaggacctgtaattaatacaaagataatcgcaacgattaattgcatatttacaaaaccttgagtagcaataaaatataaaaacgtaccaaatagtaatgacattgcacctaatgttgatgcttttccggcagcatgtgcacgtgaatatacatcttcaagtctcaataatcctatagctgctagggcgctaattaaagcaccgatgataacaaagataagtgcaagactaatcagtatgattttgatcatgttcaatcaccttacctttgtccataaatttagagaatactgcagtacctaaaaaagctaatataccaatcatcataataacgacaatcatgtatttaatatttaataaaatactgaataatgctataactgccattaattgaagaccaatcgcatctaatgcgacaacacgatcggcaagtgatgggcctagcacaacgcgaatgagcatagctaacatagaaatgacaactatgattaatgcaataacgataataacattatgattcattatatttcgcccacctctcttacaattttctctaatgatgttttaatactttctacttcttgctctttagttgaaaaatctatggcatgaatataaatttttgtacgatcgtcacttacaccaagcactacagtaccaggtgttaatgtaattaaattagacagcaagacaatttgccaatctttttttaaatctgtgtgataaacaaagaatcctggttcatttttaatcgaaggtttaataataattttcaaaacatcaaaattagctttaatcagttcgattaagaaaataataactaatttaataatacgatatagcgtgatgacataaaatctacctggtaacactctgtgtaagaggtaaacaagaactaggccaaagatgaaacctaacacaaagttatttgttgtgtaactatttgtcacaaacaaccaaaacactgcgataataaagtttaatactaattgtacagccatgttatttacctcctaatacagctttaacgtaggttgatggattgtagaatgtttctgcaccagcttttaccattggatataagtaatctgctgacaatccatataaaacagttatcacaactgcaacgattgcaatcgtagttaaatatttgacgtcgactttgttattaagatcatatccttttggttgaccgaaaaagccttgtaggaatatgcgaatgacagaatataatacgactaaacttgataataagacgatgacaccacttaaataaaatcctctttcaaatgttgattggacaataaaaaattttccataaaagccactgagtgggggaatgccagctaaacttaatgctgcgataaagaatgaccaaccaagtacaggatatcgtttaattaagccaccaaattgtcttaaatcagcagtgcctgtaattttaatcataattccgataagcaagaataatgcaagttttactaacatgtcgtgcaatgtatagtaaatagccccaatcatacctgactctgtcatcattgcaacgccgactaagatcacacctacagcaatcatgacattgtataggatgatttttttaatgttggcatatgcaacagcaccgacacaaccaaagatgatcgttaatagtgctaagaataaaatgacataatgtgaaaagcttacattatcactaaagaataggctcaatgttctagcgattgcataaacaccaacttttgttaacaaagcaccaaagaatgcaatgattggaattggtggtgcatagtatgcactaggtaaccaaacaaacattgggaatacgccagcttttgtagcaaaaacaaagataaatagtatgaaaacgatattgactaagccactgtcatgcgctgaaaggttagctaatttattgcttatatctgctagattcaatgttcctactactgaatataaaatcgctacacccattacgaagaaggatgacgatacaacgttaacaagaacatattttattgtttcttgtagttgaatttttgtagaaccaattactaataagaaataagatgacattaaaaatacttcgaaaaatacgaataggttgaaaatgtcaccagttgtgaatgcaccaatgatacctattaacataaatagtactgaaaaataataataatatctttcacgttcaataccaattgtttggtatgaatataaaatcacaatagctgtaataataatactagtaattattagtagggcactgaatatgtctaatacaaagacaatactgtatggtgctttccatgaacctagctctacgcgtattggtccatgtttaacaacatttgctaaattgataattgccgcgaccaaggttaataatgtaccgcctagtgcgacataacgctttataataggacgctttccaataaagacaagtaatatggctgtaattactggaataactagcgttaacacaagcatattactttcaatcatcttctggaactcctttcatactctcaacgttatctgtgcctaattctttatatgttctaaatgctaatactaagaaaaaggctgttgtcgcaaaggcgataacgattgctgttaaaataagtgcttgcgggataggatcaacatagctttttacgttcgcttcataaattggaacagtaccatgtttaagtccgcccatagttattaaaaataaatttgctgcatgtgttaatagtgtagttcccataacaattcgtatcagacttttagacaaaacgagatagacactaattgctgtgagaataccactaacaaaaatcataataatttccactattcgttctctccaatcgaaataataattgtcatgacagtaccaactactgcacataaaacaccgaaatcaaagaatactgctgttgtcatatgaacaggttctaatataaataacggtatatcaaatgtgacatgcgtaaagaaatttttgcctaaaaaccaacttgcgataggcgtcgcaatacaaaaaactaatccgatacctatcaagattttaaaatctaatgggaaaattttacgcattgtttctatatcaaatgcaatcgtaatgataacaagtgaacttgcgaataataatccgccgacgaaaccgccaccaggtgtataatgtcctgctaagaaaagtgaaaaaccaaagaccattaccatgaaaaagataataactgcagcaaattgcaaaattagatcattttgttgtctattcatgatttttcacctcgttaccttgcgtttgacgctttttacgtaatttaatcattgtatatacagctaatcctgcgataccaagcacagatgactcgaataaagtatccataccacggaaatcaacaagtatgacgtttaccatgtttttaccgtgagctaaatcataaacgtgctcttgataaaacttagatatcgattcaaaatgtctatttccgtatgcaattaaaccgataataatgacggacaaaccaacaccaccagcaattaaagcattagtaagctggaatgagcgcttttcattataacgatttaaatttggtaagtggtagaagcataataagaacaatgctgttgaaatagattcaacgacaaactgtgtcaatgctaagtcgggtgctttaaagaatataaacaatacagacacagcatatccaactgcacttaacataatgatgctaaataatcttgatttagcgaaaagaattaaaaaggcagcacttaataataaaattacgatacaaacttcgaaaattctaatcggactaacgtctttaaaattaatgttgaaaggtactgagaatatagtgacaaatgttaataaaattaatgcaccaaaaatgataactaaattattacgtgaataatcggtaacatagctattcgtcatcttttcagagtagtttggaataacatttgcacttctgttgtaccaataattgaatgttagtttaccaggttgtcgttgcaacaatttcacccaataactaaatgtcacaattagtaagatacctaaaatataaatcactaatgttgataaaaaggcaggcgttaatccatggaacatatggaattcaacatcatcaattaccgtatgattaatcgaagatgtagctggttcaataatcgaattagttaaaatgccagggaataaaccaaatacaattactaatgtagctaaaatagctggtgataaaagcattaatattgatacttcgtgtgcttttttaggtaattgttcaggtttatattgtccgaaaaatatatgcattataaatttaattgaatatacaaatgtgaagacactgcccactataccaatgattgggaataggtagcctaatgtatcaacactgaataaatttgcttggcttgctgtaaatgttgtttctaaaaatgattcttttgataagaaaccattgaacggtggtacaccagccatacttaatgctgtaataacagtgattgtaaatgaaataggcataattgttagtaagccacctaatttcttaacatcacgtgtaccagtagaatgatccactgcacctgtaatcataaatagggcacctttaaatgttgcatggttgattaaatggaatattgcagccgtaaatgcagcagcatatattttgctatcatcgccttgatagtgataactaatggcaccgattccaagcatcgccataatcatacctaattgggatactgttgaaaatgccagtatacctttcaagtcttgttgttttgttgcgtttagcgaagcccagaataatgtaattaaaccaacgagtgtgacagtccatacccaaccttgcgatgctgcgaagattggtgtcattcgagcgattaaatataaccctgctttaaccattgttgctgaatgaagataagcactgactggtgtaggtgcttccattgcatctggtagccaaatataaaatggaaactgagcagattttgtaaaagcaccaatcatgattaaaatcatcgcaaaaatgaagaatgggctattttgaatttcagaagcatgttgaatcatgtactgaatgctaaatgattgtgttggtatagcgagtaagatgataccacctaataatgatagaccaccaaatactgtgattatgagcgatttttgagcaccatatatagatgcttgtcgttcgcgccagaatgaaataagtaaaaaactagaaaatgacgttagctcccagaataaatatagaataataacattatctgaaagtacgacacctaacattgcacccataaatagtaataaataacaataaaaattccctagttgttctgacttacttaagtagccgattgaatataatactactaaactgccgattcctgaaataagcaaactaaagagtaaacctaagccatcaagatataaatcaaagttcataccaaaatgaggcatccaatttaaggttttcattacagtattacctgacatcgtcgttttaattaatgtaagcatataaataaatatgacgatagggacaggtaatacgaaccatcctaaatgtatacgtttaaaaaatctatacaggataggaataatgagtgcgaatattaacggtaatatcaccgcaatatgtaacaaactcactatgttgtcctcctttaaaaaatatttatgttattcattatacatgaatgatatagttctgaaaaacgtacacactccttgttgtgctttattttcagaagtatttaaataagaagaaacacgtcattttttatttaaaattttctttgtattgaagtgaataatcttcttttaagcgtgctaaactagctaaagacatttcagcatgttttgtttgctgagctttaagtttagtttctaaatctgtaattgcttgttgaagtgaatcttcatagcgcaatacatcaacattgaagtcgcgtaattgtgaacgtttcgtatagcgtttttcaaaatggcttaatgctttgcggtcatggaaaaatacaccttcagtttcagtagggttatgtaaatcaccttgtttcgggtgtttgataacttgttcaactttaacaaggacatcgtctccattttcttcaacaatcgtgacaccatagctacctgttttgtgtgaaaatcgatatagcttcatgctattttcctcccttaaaagtatgttaatatatatgtatcataacatgaatggagaatataaatggctaactatccacagttaaacaaagaagtacaacaaggtgaaatcaaagtggttatgcacacaaataaaggtgacatgacattcaaattatttccaaatattgcaccaaaaacagttgaaaattttgtgacacatgcaaaaaatggttattatgatggaatcacattccaccgtgtcattaatgacttcatgattcaaggtggcgatccaacagctactggtatgggtggcgaaagtatttatggcggtgcttttgaagatgaattttcattaaatgcatttaacttatatggcgcattatcaatggctaactcaggacctaatactaatggttcacaatttttcattgttcaaatgaaagaagtacctcaaaatatgttaagtcaacttgcagatggtggctggcctcaaccaatcgttgatgcatatggcgaaaagggtggtacaccatggttagatcaaaaacatacagtattcggtcaaatcattgatggtgaaactacattagaagatattgcaaatacaaaagtgggaccacaagataaaccacttcatgatgttgtaattgaatctattgatgttgaagaataatatctaaacataattaactaccaacattttaaactcggataaagctaatttatgaatggattagtatatattccaacgaaaataaataaactaatatgatgagcaatctcaatatatttatcaagaaagcacagtttttaaatagatgtgtattttaaagataatagttgaggttgctttttatgtttttacagagaattgctattcaaatagtaaataaattgaaaacaaagtagctggatatcatattgatttagataggaatttgttgctaattttatttgtaaatccaagtttgtagaattcttattcatttataaaataatattcgtatgatttgattttttaattagtccaccatttcgatttgtgctatgataatagtgttaagtaaacgaaataaggggttattaagttgaataactacaaaattggccaacatatcaaggtgcgtgtaactggtattcaaccatacggtgcgtttgttgagacccctaatcatactgaaggactgattcatatatcagaaattatggatgactacgttcataatttgaagaaatttctatcagaaggccaaattgttaaagctaaaattttgtctatagatgatgaaggaaagcttaatctatcattaaaggataatgattacttcaaaaattatgagcgtaagaaggaaaaacaatcagtattagatgaaatcagagaaacagaaaaatatgggtttcaaacacttaaagaacgcttaccaatctggataaaacagtcaaagcgagcaattcgaaacgactaaaggaacagataaatcgtaccgaaaatcatacaaagggtctgaaatgaaagtttcttagactataaaagagattagtatctattaaattttattagatactaatctctttttgtctacgataacgtaatatgattgattctatttacacgtacaaatggtttaaggtgacatatccattatctttgttagatagaatcgttgatttgcaatattgtatgtggatttgttttttttatttattttagaaatgagaactacaacttaaagtattaaacgaattgcaactatataaacagataattggagaatgaaaaaattacatgttatagtcaactcaataattttaaggaggaattaagtaatgaaaagtaaatacgaaccattgtttgataaagtagaattaccaaatggagtagagttgagaaatcgatttgtgttagcccctttaacacatatttcttcaaatgatgatggtactatttcagatgtagaacttccttatattgaaaagcgttcacaagatgttggtattacaattaatgctgcgagtaatgtgagtgatgtcggaaaagcatttccaggacagccatcaatcgcgcatgacagtaatattgaaggactaaaacgattagctacagcaatgaagaaaaacggtgccaaagcactcgtacaaatacatcatggcggtgcacaagcattgcctgaattaacacctgatggagacgtcgtagcaccaagtccaatttctttaaaaagttttggtcagaaacaagaacatagtgctagagaaatgacgaatgaagagattgaacaagcaatcaaggattttggtgaagcaacgcgacgtgcaattgaagcagggtttgatggtgttgaaatacatggcgcgaatcattacttaattcatcaatttgtatcaccatactataatagaagaaatgatgtatgggcaaatcaatataaattcccggtcgctgtgattgaagaagtacttaaagcgaaagaagcgtatggcaataaagactttatagttggatacagattatctccagaggaagcggagtctccaggaatcacaatggaaattacagaggaactcgttaataaaattagccatatgccaatcgactatattcatgtttcaatgatggatacgcatgcaacgacacgtgaaggtaaatacgctggacaagaaagactgcctttaattcacaaatggataaatggtcgtatgccacttatcggtattggttcaattttcacagctgacgaagctttagatgcagttgaaaatgttggtgttgacttagtagccattggtagagagctactactggattatcaatttgttgaaaaaattaaagatggacgggaagatgaaattattaattactttgatccagagagagaagataatcatcacttaactcctaatttatggcatcaatttaatgaagggttttatccattaccacgtaaagataaataagtgtttaactgttaccactaatgatattgtgtatgcaatttgttagtggttttcaatatttataaataaaaatattcttagtaaaatatacttttgattaagtgtaaaattatcaattcttttgcttgtaatcatttaagtaattatgtcattataaatgtaagggttttcaaaatagacaaatttaatgaaacttagtgattatttcatcttttttggtggaaaagtatctgctttgaaaactaatgtaattatttggataatgtttcatgtataatagttataaatgatgaaaaggggagatatgatgactaaatctgaaaaaattattgagttaacaaatcattacggagcacataattatttaccattgccaattgtcatttcagaagctgaaggggtatgggttaaagatcctgaaggcaataaatatatggatatgttatctgcatattccgctgttaaccaaggtcatagacatccgaaaattattcaagcattaaaagatcaagctgataaagtgactttagtttcacgtgcttttcatagtgataacttaggtgaatggtacgaaaaaatttgtaaactggcaggtaaagataaagctttaccaatgaatacaggtgctgaagcagtagaaacagctttgaaagcagcacgacgctgggcatacgatgttaaaggaattgagccaaataaagcagaaatcattgcatttaatggtaacttccatggtcgaacaatggcgccagtttcattatcttcagaagcagaataccaacgtggttatggtccgttattagatggatttagaaaagttgattttggagatgtagatgcattgaaagctgcaattaatgaaaatactgcagcagttttagtagaaccaattcaaggtgaagcgggtataaatataccgccagaaggatatttgaaagcaattagagaattatgtgatgaacataatgtcttatttattgctgacgaaatccaagcaggattaggtcgttcgggtaaattatttgctacggattgggataatgtaaaacctgatgtctatattttaggtaaagcactaggtggtggagtcttcccaatttctgttgtattagcagataaagaagtattagatgtctttacacctggctcacatggttcaacatttggtggtaatccacttgcttgtgctgcatcaattgctgcattagatgttatcgttgatgaggatttaccaggccgctctttagaattaggagattattttaaagaacaattaaagcaaattgatcatccatcaattaaagaagtccgtggacgtggtttgtttataggtgtggaacttaatgaaagtgctagaccatattgtgaagctttgaaagaagaaggcttattatgtaaagaaacgcatgatactgtcattcgttttgcaccaccattaattattactaaagaagaattggaccttgcacttgaaaaaataagacatgtatttcaataatgtcaaaaagttgtaacaatcagtttgtaagggctttaaaaaggaatacgttatgttacaatatgtttgaaagcgaaatcattaggtaaagaagaggcgaaaaggatcatgactgagaacaataatttagtaacttctactcaaggaattattaaagaagcattgcataaattgggatttgacgaaggaatgtacgatttaattaaagaacctttaagaatgttacaagtgcgtatccctgtacgaatggatgatggcacagtaaaaacattcacaggttaccgtgcgcaacataatgatgctgttggaccaacaaaagggggcgtgcgtttccacccagatgttgatgaagaagaagtaaaagcattatcaatgtggatgactttgaaatgtggcattgtaaacttaccatacggtggtggtaagggtggtatcgtttgtgatccacgtcaaatgagcattcatgaagttgaacgtttatcacgcggatatgtaagagcaatttcacaattcgtaggtccgaacaaagatattccagcaccagatgtatttacaaactcacaaattatggcttggatgatggatgaatatagtgcattagataaatttaattcaccaggtttcatcacaggtaaaccaattgtattgggtggttctcatggacgcgacagatcaactgcactaggtgtagttattgcaattgaacaagctgcaaaacgtcgtaatatgcaaattgaaggtgccaaggttgttattcaaggtttcggtaatgccggaagtttcttagctaaattcttatatgatttaggtgcaaaaattgtaggtatctctgatgcttacggtgcattacacgatccaaatggcttagatatagattatttattagaccgtcgtgatagttttggtacggtaacaaatttatttgaagaaacaatctcaaataaagaattgtttgaattagattgtgacattttagtaccagcggctatttcaaaccaaattacagaagacaatgcacatgatattaaagctagtatcgttgttgaagctgctaatggacctacaacaccagaagcaacacgtattttaactgaacgtggtatattattagttccagacgtattagcaagtgctggtggtgtaacggtttcttacttcgaatgggtacaaaataatcaaggttattattggtctgaagaagaagttaatgaaaagctacgtgaaaaattagaagcggcatttgatacgatttacgaattgtctcaaaaccgaaaaatagatatgagacttgcagcatatatcataggtattaaacgtacagcagaagcagctagatatcgtggttgggcataattaattatcatatgtgatttaacgagcttgggacagaaaacaaagccctaagctcgttaattttattttagcagtagttgactgtaaaacaatgcccgtgtaacacgctcttttcaaaaatagtcggggccccaacacagaggctggtggaaagtcagcttacaatagtgtgcaagttggcggggccccaacacagaggctggcggaaagtcagcttacaatagtgtgcaagttggggtggagccccgacacagagaaattagctcctcaatttctacagacaatgcaagttggcggggccccaacacagaagctggcgaaaagtcagcttacaatagtgtgcaagttggggtgggacgacgaaataaattttgcgaaaatatcatttctgtcccactcccaaaaagacagcagtaggataatttcaatttggaaatatcttactgctgttttttatagtaatagctatatttttgtatttatgttttctagtttaacattactacttaatgacttctttatatttatcagcgaaatttgtaaagacaccatcaacgccatatttatttaatcgtaacatatcagctttttcattcactgtataaggatgtactataaatcctaagtcttttaaatgatgggtattttgttcagttaaatctgtataatcaggacctaatccaatcgcataagagcgtatctcttttaagcgttggtcgttaaattgttgtagttcacctttatcaactaattttactaatggcacatgcttattttgacgatgaattttctttaaactttcgtcagaaaatgattgaatcattacatgtccattttttaatttattgttatttaaaaggtgatgctttttcaatgaagctaataattgttcttccattcctgggtatacatcaggtgactttgtttcaatataatagtttgcattcgggccataacgttctaaaatttcatctaaagtgggtactttagcatttttataacttgctcttgcgtattttggatattttttattaaaccaacttcctgcatctaactgttttaattcatcaagggtataatcctcaactttaccgtgtccatttgttgtacggttaacagtttcatcatgcatagcaactaaatggccatctttggtacgttgtaaatcaatttcgatataagatgcttttaactcattatgactcttatcatatgcttgaaacgtatgctcgggtgcatagccacttgcgccacgatgtgcgatagtagtgaatcgctcattcgttaaatttgtatgccattgaatagcctgaggtttatttgcaatttgatttgtttgttcagcgccagcagtaggtactgataaaaatcccatagtaaaaacagcagaagcagccataaatttagtgaagcttttcgaagagttagtcatagtctttatcctttcatctctttatttgtagtctaacaattttaaaatactacaaaaacctgcttgtgaaaacgctttacacatttcttttacaatttataacatttttgtaatataaatttaaaagaattatcaaacattttaggaatcttaaaaatgtgatgttcaacaagacgaagagagcattaaaatacccacaatgtaattttaatagacattgtgggtaggtagattaacgtatttattgtgatagtaattgtttagcaacatcaagttgttgtttgaccgatgattgacctgttgaaccgtaactttgacgtcgttttaaacaattttcaggctgcaaataatcgtaaatatcggcatcaatactagaatgatgttgttgatatgttgctaaaggaacatctaataaataatgaccttgttgtatacattctaagacgatttttcctacaatttcatgtgcagttctaaatggaatatttttagttactaaataatctgctagttccgttgcatttgaaaaatcttctttaacagtttgattgagtcgttctttattaattgtcatcgtttgaatcataccttcgaaaatacgtaaagaacctttaattgtatggacagcatcgaataaaccttctttatcttcctgcatatctttgttatatgctagaggtaatccttttaaagtcataagcatgctcattaaatgaccagtcgttcgaccaactttacctctaattaattctgccatatcaggatttttcttttgtggcataatagatgagccagttgaaaatgcatctgataatgtaatgaatttagcttcgtctgtggaccagaaaataatttcctctgcaaagcgtgataagtgaaccatcgttaaagaaatattatgcaatgtttcaataatatagtctctgtcactaacagcatctaggctattctcatagagactgccaaagttcaacaatgctgttgtctcgtgtctatcgatagggtatgtggtaccacttaaggctgctgcacctaaaggattaatatcgattcgttttaaactatcttcaaatcgttgttggtctcgttgtaacatccaaaaataagtcataatatgatgtgcaaatgaaattggctgtgcacgctgtaaatgagtataaccaggcataattgtatcaacattattggaagcgatgtctacaattacactttgtaacgacttaattaatgcgatgatatcttgcacttgtttcttagtgtacaagtgcatgtctgttgcaacttgatcgtttctactgcgtccagtatgcaacttaccaccagcatcaccgatacgtttaattaattcatgttcaatatttaaatgaatatcttctaatgatgcactaaattgaatttgatcttgatgataatcatgttgaatagattttagtccttgtataatttgttcgctgtcttgttgactaataatgccttgattcgcaagcatagttgcatgtgcaatgctgccttcgatatcttgatctatgagcgtttgatcaaaagtaatggatgcgttaaagtcgtcaacccactcttcaggttgtacttcaaatctaccgccccaagctttattgctcattgctatagcctccatgcaacatcgcatttacttgagtaggtaaaccatagatatcgataaagccaacagcagcgtcttgattaaatgcatcttcttttgtataagttgctaatttttcatcatataatgtgtaaggtgattttctaccattcacgatggcattacctttgaataatttaattctgacatcaccacttacgtattgctgagtactatcaataaataatttcaagctatcagttaaaggtgagaaccaaagtccattgtatagttgttcagcaaattgcttctcaatgattggtttaaagtgtgcgacatctttcgttaacgtaatcgtttctaatgctttatgcgcttttaaaataacttctgcagcaggtgcctcataaatttctcttgatttgatacctacaagtctattttctacatggtcaattcttccgataccatgcttaccagctaatgcattcaacgttaaaattaaatcgtctaattcatatgttttgccatcaatttgaactgggatgcctttatcaaacgttaaaatgatttcatcagcagtatctggtgtttcttctaaagcatttgttagatcgaacgcatcctctggtggcgcagcataaggatcttctaaaataccacattcattcgctctgccccatagattttgatcgatagaataaggtgaatcatggttgattgatacagggatattatgtttaattgcataatcgatttcttcttcacgactccatgcccactcacgtacaggtgcgaatgctttcaatgatgggtttaatgctttaatggcaacttcgaaacgtacttggtcattccctttaccagtacaaccatgtgcaatacctactgaatttgttttctcagcaatctctactaattttttagcgattaatggtcttgataaagctgaaactaatggatatgcattttcatacattaaatttcctttgattgcataacttacatactcatcactaaattcttttgttgcatcaataatatgacattcaactgctcccatatctaaagcttttttataaacgatgtctaaatctttaccttcaccaacatctaggcaacaagctacaacgtcgtatcctttgtcgataagccattgaacggccacacttgtatctagtcctcctgaatatgctaaaacaattttctctttcataaaattcacctcattgtagttatctgaatatttcgtatgaacacatgatagcaaacttttaatgaaaataaaaccattattttacatatttattcataaaatgcgatagagatagttagagttgtaagtgtaaatgcttatttatcaatgtttaaaagtattttaaaaaacatgcaaattgtataaaaaatgtttgagtgtttgacgccagtttgaaatgtttgttgaaaaataggtgtgaaacgtcacataaatatcaattttattgattaagtacaaacttgtgaattgaatcgcaaacgtaaacttagtaaaattaagatattaaatgaaacaggaggcttttatagatgactcatattcaattagattttagtaaaacgttagaatttttcggtgaacacgaattaaaacaacaacaagaaattgttaaatcaattcacaaaacaattcatgaaggtactggtgcaggtagtgacttcttaggctggattgatttaccagttgattacgacaaagaagaattttcaagaattgttgaagcatcaaaacgcattaaagaaaattctgatgttttagtagtcatcggtattggtggttcttacttaggtgcacgtgcagcaatcgaaatgttaacgtcatcatttagaaacagcaatgaataccctgaaattgtatttgttggtaatcacttatcatcaacatatacgaaagagttagttgattatttagcagacaaagatttctctgtaaacgttatttctaaatctggtacaactacagaaccagcagttgcatttagattgttcaaacaattagttgaagaaagatacggtaaagaagaagcacaaaaacgtatatttgcaacaacggataaagaaaaaggtgctttaaaacagttggctacaaacgaaggttatgaaacgtttatcgtacctgatgatgtaggtggaagatattctgttttaacagcagtaggattattaccaattgcaacagctggaattaacatcgaagctatgatgattggtgctgcaaaagcacgtgaagaattatcttcagataaattagaagaaaacattgcataccaatatgcgacaattcgaaacattttatatgcaaaaggttatacaacagaaatgttgattaactatgaaccatctatgcaatactttaatgaatggtggaaacaattatttggtgaatcagaaggtaaagacttcaaaggtatctatccttcaagtgccaactacacaactgatttacattctttaggtcaatatgtacaagaaggccgtcgcttcttattcgaaacagttgtaaaagtaaatcatcctaaatatgatattactattgaaaaagatagtgatgatctagacggattaaattatttagctggtaaaacaatcgacgaagttaacacaaaagcattcgaaggtacattattagcgcatactgatggtggtgttcctaacatggtagtgaacattccacaattagatgaagaaactttcggttacgtcgtatacttcttcgaacttgcttgtgcaatgagtggataccaattaggcgtaaatccatttaaccaacctggtgtagaagcatataaacaaaacatgttcgcattattaggtaaacctggttttgaagacttgaaaaaagaattagaagaacgtttataaaatacattacttcaaagattagtgaagtttgaaaagatagaactagacgttaactatttaaagcatattttcgaggttgtcattacaaatgtaaaaatgtaatgacaacctcgtttttatttatatgcaagaactaggttactagctaatgtgacaagatgttaagagaaaattaaagataaaataatatctgccttacaataatattgttatactactagagactgatttattagcatgattacatgttaatgtttctttacttagtaattaactttataatgtaagaataattatcttcaaccaaagaaagggattgatgatttgtcgtttcatcaagtagaagaatggtttgagatatttcgacagtttggttatttacctggatttatattgttatatattagagctataattccagtatttcctttagcactctatattttaattaacattcaagcttatggacctattttaggtatattgattagttggcttggattaatttctggaacatttacagtctatttgatctgtaaacgattggtgaacactgagaggatgcagcgaattaaacaacgtactgctgttcaacgcttgattagttttattgatcgccaaggattaatcccattgtttattttactttgttttccttttacgccaaatacattaataaattttgtagcgagtctatctcatattagacctaaatattatttcattgttttggcatcatcaaagttagtttcaacaattattttaggttatttaggtaaggaaattactacaattttaacgcatcctttaagagggatattaatgttagttgtgttggttgtattttggattgttggaaaaaagttagaacagcattttatgggatcgaaaaaggagtgacatcgtgaaaaaagttgtaaaatatttgatttcattgatacttgctattatcattgtactgttcgtacaaacttttgtaatagttggtcatgtcattccgaataatgatatgtcaccaacccttaacaaaggggatcgtgttattgtaaataaaattaaagttacatttaatcaattgaataatggtgatatcattacatataggcgtggtaacgagatatatactagtcgaattattgccaaacctggtcaatcaatggcgtttcgtcagggacaattataccgtgatgaccgaccggttgacgcatcttatgccaagaacagaaaaattaaagattttagtttgcgcaattttaaagaattagatggtgatattattccgccaaacaattttgttgtgctaaatgatcaagataataacaagcacgattcaagacaatttggtttaatcgataaaaaggatattattggtaatgttagtttacgatactatcctttttcaaaatggactgttcagttcaaatcttaaaaagaggtgtcaaaattgaaaaaagaaatattggaatggattatttcaattgcagtcgcttttgtcattttatttatagtaggtaaatttattgttacgccatatacaattaaaggtgaatcaatggatccaactttgaaagatggcgagcgagtagctgtaaacattgttggatataaaacaggtggtttggaaaaaggtaatgtagttgtcttccatgcaaacaaaaatgatgactatgttaaacgtgtcatcggtgttcctggtgataaagtagaatacaaaaatgatacattatatgtcaatggtaaaaaacaagatgaaccatatttaaactacaatttaaaacataaacaaggtgattacattactgggactttccaagttaaagatttaccgaatgcgaatcctaaatcaaatgtcattccaaaaggtaaatatttagtgcttggagataatcgtgaagtaagtaaagatagccgtgcgtttggcctcattgatgaagaccaaattgttggtaaagtttcatttaggttctggccatttagtgaatttaaacataatttcaatcctgaaaatactaaaaattaatatgaaacaaatacaacatcgtttgtcggttttaatactgataaacgatgttttattttgttagtaccacaataaaagctaagttcgaaatgaacttataataaatcaatcacaatcactttgtgttaaaatatgtgtcaaaggaagtgagggtttgtcatgacattacatgcttatttaggtagagcgggaacaggtaagtctacgaaaatgttgaccgaaataaaacaaaaaatgaaagcagatccgcttggagatccaatcattttaattgcgccaactcaaagtacatttcaattagaacaagcctttgtcaatgatccggaattaaatggtagtttaagaacagaagtgttgcattttgaacgattaagtcatcgtattttccaagaagttggtagttatagcgaacaaaagttatctaaagctgcaacggaaatgatgatttataacattgttcaagaacaacaaaagtatttaaaactttatcaatcacaagcaaaatattatgggtttagtgaaaaattaacagaacaaattcaagattttaaaaaatatgcagtaacgcctgaacatttagaacactttattgctgataaaaatatgcaaactcgaactaaaaataagttagaggatattgctttaatataccgtgagttcgaacaacgcattcaaaacgagtttattacgggtgaggattcattacaatattttattgattgtatgccgaaatcagagtggctaaaacgtgctgatatatatattgatggttttcacaacttttcaacgattgagtatttaataatcaaaggattaattaaatatgcgaagagtgtcacaattatattgacgacagatggtaaccacgatcaatttagtttatttagaaaaccatcggaagtgttacgacatattgaagaaatagcaaatgaactcaatatttctattgaacgtcaatatttcaaccaattatatcgcttcaataatcaagatttaaagcatcttgaacaagaatttgatgcacttcaaatcaatcgagtggcatgtcaaggtcatatcaatattttagaatctgcgactatgagagaggaaataaatgaaattgcgcgacgtatcatcgttgatattcgtgataagcaattacgatatcaagatattgctattttatatcgtgatgaatcttatgcttatttatttgattccatattaccgctttataatattccttataatattgatacaaagcgttcgatgacacatcatccggtcatggaaatgattcgttcattgattgaagttattcaatctaattggcaagtgaatccaatgctacgcttattgaagactgatgtgttaacggcatcatatctaaaaagtgcatacttagttgatttacttgaaaattttgtacttgaacgtggtatatacggtaaacgttggttagatgatgagctatttaatgtcgaacattttagcaaaatggggcgtaaagcgcataaactgaccgaagatgaacgtaacacatttgaacaagtcgttaagttaaagaaagatgtcattgataaaattttacattttgaaaagcaaatgtcacaagcggaaactgtaaaagattttgcaactgctttttatgaaagtatggaatatttcgaactgccaaatcaattgatgacagagcgagatgaacttgatttaaatggtaatcatgaaaaggcggaggaaattgatcaaatatggaatggcttaattcaaatccttgatgacttagttctagtatttggagatgaaccaatgtcgatggaacgtttcttagaagtatttgatattggtttagaacaattagaatttgttatgattccgcaaacattggaccaagtaagtattggtacgatggatttggctaaagtcgataataagcaacatgtttacttagtaggtatgaatgatggaacgatgccacaaccagtaactgcgtcaagcttgattacagatgaagaaaagaaatactttgaacagcaggctaatgtcgagttaagtccaacatcagatattttacagatggatgaagcatttgtttgttatgttgctatgactagagctaagggagatgttacattttcttacagtctaatgggatcaagtggtgatgataaggagatcagcccatttttaaatcaaattcaatcattgttcaaccaattggaaattactaacattcctcaataccatgaagttaacccattgtcactaatgcaacatgctaagcaaaccaaaattacattatttgaagcattgcgtgcttggttatatgatgaaattgtggctgatagttggttagatgcttatcaagtaattagagatagcgatcatttaaatcaaggtttagattatttaatgtcagcattaacgtttgacaatgaaactgtaaaattaggtgaaacgttgtctaaagatttatatggtaaggaaatcaatgccagtgtatcccgttttgaaggttatcaacaatgcccatttaaacactatgcgtcacatggtctgaaactaaatgagcgaacgaagtatgaacttcaaaactttgatttaggtgatattttccattctgttttaaaatatatatctgaacgtattaatggcgattttaaacaattagacctgaaaaaaataagacaattaacgaatgaagcattggaagaaattttacctaaagttcagtttaatttattaaattcttcagcttactatcgttatttatcaagacgcattggcgctattgtagaaacaacactaagcgcattaaaatatcaaggcacgtattcaaagtttatgccaaaacattttgagacaagttttagaaggaaaccaagaacaaatgacgaattaattgcacaaacattaacgacaactcaaggtattccaattaatattagagggcaaattgaccgtatcgatacgtatacaaagaatgatacaagttttgttaatatcattgactataaatcctctgaaggtagtgcgacacttgatttaacgaaagtatattatggtatgcaaatgcaaatgatgacatacatggatatcgttttacaaaataaacaacgccttggattaacagatattgtgaaaccaggtggattattatacttccatgtacatgaacctagaattaaatttaaatcatggtctgatattgatgaagataaactagaacaagatttaattaaaaagtttaagttgagtggtttagttaatgcagaccaaactgttattgatgcattggatattcgtttagaacctaaattcacttcagatattgtaccagttggtttgaataaagatggctctttgagtaaacgaggcagccaagtggcagatgaagcaacgatttataaattcatccaacataacaaagagaattttatagaaacagcttcaaatattatggatggacatactgaagttgcaccattaaagtacaaacaaaaattgccatgtgctttttgtagttatcaatcggtatgtcatgtagatggcatgattgatagtaagcgatatcgaactgtagatgaaacaataaatccaattgaagcaattcaaaatattaacattaatgatgaatttgggggtgagcaatagatgacaattccagagaaaccacaaggcgtgatttggactgacgcgcaatggcaaagtatttacgcaactggacaagatgtacttgttgcagccgcggcaggttcaggtaaaacagctgtactagttgagcgtattatccaaaagattttacgtgatggcattgatgtcgatcgacttttagtcgtaacgtttacaaacttaagcgcacgtgaaatgaagcatcgtgtagaccaacgtattcaagaggcatcgattgctgatcctgcaaatgcacacttgaaaaaccaacgcatcaaaattcatcaagcacaaatatctacactccatagtttttgcttgaaattaattcaacagcattatgatgtattaaatattgacccgaactttagaacaagcagtgaagctgaaaatattttattattagaacaaacgatagatgaggtcatagaacaacattacgatatccttgatcctgcttttattgaattaacagagcaattgtcttcagatagaagtgatgatcagtttcgaatgattattaaacaattgtatttctttagcgttgcaaatccaaatcctacaaattggttggatcaattggtgacaccatacgaagaagaagcacaacaagcgcaacttattcaactactaacagacttatctaaagtatttatcacagctgcttatgatgctttaaataaggcgtatgatttgtttagtatgatggatagcgtcgataaacatttagctgttatagaagatgaacgacgtttaatggggcgtgttttagaaggtggctttattgatataccttatttaactggtcacgaatttggcgcgcgtttgcctaatgtaacagcgaaaattaaagaagcaaatgaaatgatggtcgatgccttagaagatgctaaacttcagtataaaaaatataaatcattaattgataaagtgaagagtgattacttttcaagagaagctgatgatttgaaagctgatatgcaacaattggcgccacgagtaaagtaccttgcgcgtattgtgaaagatgttatgtcagaattcaatcgaaaaaagcgtagcaaaaatattttggatttttctgattatgaacattttgcattacaaattttaactaatgaggatggttcgccttcagaaattgccgaatcataccgtcaacacttccaagaaatattggtcgatgagtatcaagatacgaaccgagttcaagagaaaatactatcttgcatcaaaacgggtgatgaacataatggtaatttatttatggttggagatgttaagcaatccatttataaatttagacaagctgatccaagtttatttattgaaaagtatcaacgctttactatagatggagatggcactggacgtcgaattgatttgtcgcaaaacttccgttctcgaaaagaagtactgtcaacgactaactatatattcaaacatatgatggatgaacaagtcggtgaagtaaaatatgatgaagcggcacagttgtattatggtgcaccatatgatgaatcggaccatccagtaaacttaaaagtccttgttgaagcggatcaagaacatagtgatttaactggtagtgaacaagaagcgcattttatagtagaacaagttaaagatatcttagaacatcaaaaagtttatgatatgaaaacaggaagctatagaagtgcgacatacaaggatatcgttattctagaacgcagctttggacaagctcgcaatttacaacaagcctttaaaaatgaagatattccattccatgtgaatagtcgtgaaggttactttgaacaaacagaagtccgcttagtattatcatttttaagagcgatagataatccattacaagatatttatttagttgggttaatgcgctccgttatatatcagttcaaagaagacgaattagctcaaattagaatattgagtccaaatgatgactacttctatcaatcgattgtaaattacattaatgacgaagcagcagatgcaattttagttgataaattaaaaatgtttttatcagatattcaaagttaccaacaatatagtaaagatcatccggtgtatcagttaattgataaattttataatgatcattatgttattcaatactttagtggacttattggtggacgtggacgacgtgcaaatctttatggtttatttaataaagctatcgagtttgagaattcaagttttagaggtttatatcaatttattcgttttatcgatgaattgattgaaagaggcaaagattttggtgaggaaaatgtagttggtccaaacgataatgtcgttagaatgatgacaattcatagtagtaaaggtctagagtttccatttgtcatttattctggattgtcaaaagattttaataaacgtgatttgaaacaaccagttattttaaatcagcaatttggtctcggaatggattattttgatgtggataaagaaatggcatttccatctttagcttcggttgcatatagagctgttgccgaaaaagaacttgtgtcagaagaaatgcgattagtctatgtagcattaacaagagcgaaagaacaactttatttaattggtagagtgaaaaatgataaatcattactagaactagagcaattgtctatttctggtgagcacattgctgtcaatgaacgattaacttcaccaaatccgttccatcttatttatagtattttatctaaacatcaatctgcgtcaattccagatgatttaaaatttgaaaaagatatagcacaaattgaagatagtagtcgtccgaatgtaaatatttcaattgtgtactttgaagatgtgtctacagaaaccattttagataatgatgaatatcgttcggttaatcaattagaaactatgcaaaatggtaatgaagatgttaaagcacaaattaaacaccaacttgattatcgatatccatatgtaaatgatactaaaaagccctcaaaacaatctgtttctgaattgaaaagacaatatgaaacagaagaaagtggcacaagttacgaacgagtaaggcaatatcgtatcggtttttcaacgtatgaacgacctaaatttctaagtgaacaaggtaaacgaaaagcgaatgaaattggtacgttaatgcatacagtgatgcaacatttaccattcaaaaaagaacgcatatctgaagttgagttacatcagtatatcgatggattaatcgataaacatattatcgaagcagatgcgaaaaaagatatccgtatggatgaaataatgacatttatcaatagtgagttatattcgattattgctgaagcagagcaagtttatcgtgaattaccgtttgtagttaaccaagcattagttgaccaattgccacaaggagacgaagacgtctcaattattcaaggtatgattgacttaatctttgttaaagatggtgtgcattattttgtagactataaaaccgatgcatttaatcgtcgccgtgggatgacagatgaagaaattggtacacaattaaaaaataaatataagatacagatgaaatattatcaaaatacgcttcaaacgattcttaataaagaagttaaaggttatttatacttcttcaaatttggtacattgcaactatagtattttgattttcaaaagaataaaaaataatttcgattaagtgcaaagtccttgtagcagaatgaacacaactcattttcaaaattgtcttacttatttatttgttatttgataacgaaaaaagttataatgtgaattaagataaagatgaggagttgagaatgaatgaaattcttatcattcaagtataatgacaaaacttcatatggcgttaaagtaaaacgcgaagatgctgtatgggatttaacacaagtatttgctgactttgcagaaggagatttccatcctaaaacattgttagctggtttacaacaaaatcatactttagattttcaagaacaagtacgtaaagcagttgtagcagcagaagatagcggcaaagctgaagactataaaatttcatttaatgacattgaatttttaccaccagtaacacctccgaataatgtgattgcttttggtagaaattacaaagatcatgcgaacgaattaaatcatgaagtggaaaaattatatgtatttacaaaagcagcgtcatctttaacaggagataatgcaacaattccaaatcataaagatattactgatcaattagattatgaaggtgaattaggtattgttattggtaagtctggtgaaaagattccaaaagcattagctttagattatgtttacggctatacaattattaacgatatcactgatcgcaaagcacaaagtgaacaagatcaagcatttttatcaaaaagtttaactggcggttgcccaatgggtccttatatcgttactaaagacgaactaccattacctgaaaatgtaaatattgttacaaaagttaacaatgaaattagacaagatggtaacactggcgaaatgattcttaaaattgatgaattaatagaagaaatttcaaaatatgttgcactacatccgggagatattattgcaactggtacaccagcaggcgttggtgcaggtatgcaaccacctaaatttttacaaccaggtgatgaagttaaagtgactattgataatattggaacgctgacaacttatatcgctaaataattatcatttaaaaagctaaccagtctttatatagattggttagttttttcttgcttttctaaaaaggtgttaaagataaattatttataatgttaccattttgagatgaaagtgaaatattgatattaagaagtagttgattattttacagcagattcacaatattctaataaggaataaaatgtcatgttcttcctctcaaatatagaagtgtggtagaatatatattcgtgtataatcaaatcatgattaaattacaagcaagtgggtattaatcccaagaagctttaatttaataatataaataattaaagtggggggaatcagtatgttacatttacatatattaagttgggtattagcgattattttatttatcgctacatacttaaacatttcaaaaaatcaaggcagatcaccatttttcaaaccgttgcacatgattttacgcttatttatgctgttgacgttaatttcaggattttggatattaattcagtcatttatgaatggcggggcaaatcatatgttgcttacattgaaaatgctgtgtggtgttgcagtagttggattgatggaagtgtcgattgctaaaagaaagagacatgaacaaagtcacacaatgttttggataacaattgcattaattatcatcacaatggtattaggtgtcattctaccgttagggcctatatcaaaattattcggtattggctaattgataagacatatagtatatgacataaggcatggacaattattagtccaagaccttatgtcttttttgattctaaaaatgttaaacataaaaaatggactggatagtagtaccagtccaacataattctaacctagacaattaagattagattgaatcgcatgattcatttatttagctttgtaaccaatcatattgattaaatctttagggtggctatatggtggtgcataagccacttcaaactcagttaactcatctacagttagctggttcatcattgccatcgatagtacatcaatacgtttatctgcaccttcttttcctactgcagctgctcttaaaatctgacggtttgaagtgtcataatatactcttaagtgtaaaggggaatttcctgggtaataattcgcgtgtgcaccttgagtgacttctaccattttatagtcaaattgctttagttcgtttggtttaacgccgacactcgcaaatgtataatcaaagaacttcacaatattgttgcctaagaagcctttgaattcaatagtgtcatttccagcaatttgttcggcaacaatacttgctgcacggtgagcgccccaagctaaaggaacactagccggtagatcgacatgtcgataatgtgatgttgcaatatcgcctattgcataaatgtttggaacatttgtttcaaatttatcgtttaccggtatgaaaccttttcgatcaagtttgatatttgaactttcgataaattttgaattggggtgagtaccgacaccttcaataatcatatcgtaatgttcaacttttcctgatttaaatgtaatttcatttccattgatagcattaatttcctcatttaaacggtatggaatctcccgcttatctaattcatcaagtataggttgattcatgtcggcatccattaatttatttatcttatcagatcgatgaattaaagtagggtgtaaaccacgttcataaagattttcaagaacttctaatgaaacataacctgcacctacaaccaatactttatcaacttgatttgctttgatgaattgatcgatagcatcagtgtcttctaaatttctaagtgtaaatgtaatatcactttcaaagccaaggctatttgcacttgcaccagggcttaaaatgagtttatcgtaagattcttcaaattgttcgtttgtctttctatttaatacagatacagtttgtctttcatcattgattgcaataacttcatgataagtttttactgtaatttgctttctatcataaaatttttcaggtgtatacgctaaagcatatcttctatcttcaacaacttcgccaatgacataaggcaatgcacaattagcaaagctcatatcacgatctttttcaaaaataataatgtcactttctttatctaaacgtcgaatttggctggcacatgttgcaccgccagcgactgctccgactacgactattttgggcatcgtaacttacctcctattgttttaaaatattataaaatgattagttataaattaacagtaatatctaatatttaaattaaagaaatcattcaaatatcgaccaatgccatcttcattattgttgaatgtaatattgttcgctacatctttaagttcttgcaaaccattttccatagcaacaccgtgacgcgcgtactcaatcatttcaatatcattatcttcatcaccgaatgcaataatattatttcggtcaatatttaaaaattgtctaacttgctcaatgcctcttgctttattaataccaagttttacaatttcaatgacagggaatggtgcgccccagcgtcgatgctcaatatgatcggcataaaaatgagtaagcatatttttgatttcaggtattttactttcttcggcttcaattaaaattgaggtaggggattctttcaagtggacaagtaaattaccagtttgaattcttggattacccattgaaaaaccttcaaataatcttggatcatgattgttaatgaaaacataatctttcacttctgctataatattcgatacttgatattgttgtaatccttgaataatgttttgtgcgatgcctaaatctaaaatttcatggcaagttttgaagtttttatctttagggtgatgtacgtaagcgccattaaaattaacaattggtgtcgttaaatttaattcatgataatacatttgacttgcacgataaggtctgccagtcgcaatcataatttggtgtccacgttgttgtaattcatttaatacttgtttagtatatgatgaaatttctttgttatcgtttaataatgttccgtctaagtctagacatattaaatgtggttgcatatctctctcctcataagttgcttagttcatatagatacatcatagcattttattggcgttttgtcggatatttgatatattatgaataatatgacattaaagaggtgatatggatggaagaggcattgaaagatagtatcttaggtgcattagaaatggtaattgaccctgaattaggaattgatatcgttaatttgggtttagtatacaaagtgaatgttgatgatgaaggcgtatgtacagttgatatgactttaacatcaatgggatgtccaatgggacctcaaattattgatcaagttaaaacagtattagcagagattcctgaaattcaggatactgaagtgaatatcgtatggagtccaccttggacaaaagatatgatgtcacgttacgctaagattgcacttggtgtgagctaacataaacttgcattgcctgtagaatttcttttcgaaattctctgtgtttgggcccgcagtcaatataacattgtagagtataattcattgtgaataagctcccttcaaagtagacattgaaaaatgaaaattttgaagggagccttatttatgttctagtttctgattttattttgaaaatttatatctaacttgtttcaaaaaatatgaattaagacagtgacttgcacttccaagagtgcacaattcattttctagttgaatattttcttgaaaatttttataataaattgaatttatattacagttatattacaatacataatacttcatagtttttaagttgccgagttgcattacaaattggatttcgaagtaagaatcatcattggtaatttttttaatttaacagtattttagtcaatatgattttgatgatgtcgtaattcaataatatacatatgcatttcaatattcttttaaacagcataactaaatttaattaagcatctaagaagaacagttttaaaagggaagaatgcaaaaatgaacaaaacaaagggttttacaaagtataagaaaatgagatatattccagggctcgatggtttgagggcaatcgctgttctaggaattattatttaccacttaaataagcaatggttgacaggtggctttttaggtgtggatacattttttgtgatctctggttatttaattacaagcttattactcaaagagtatgatgacacaggtatcattaaattgaaaagcttttggatacgtcgtttaaaacgtttattaccagcagtcatagttttattaatggttgtagggacagcaaccttattattaaaatcagataatatcattagggttaaacatgatattattgctgcgatattttatgtatcaaactggtggtatatagcaaaagatgttaattattttgagcaattttcatttatgccattaaagcatttatggtctttagcaattgaagaacagttttacatatttttcccagttattttggttacattattgttaacaattaaaaagcgatacaaaataggatttattttttggggagtatcaataatttctttagggttaatgatgtttatctatagtattaatggggatcattcacgagtgtattttggtacagatactagattacagacattgttactgggtgttattttagcttttttatggccaccgtttaaattgaaaaatgatccacctaaagttgtaaaatatgttattgatagcataggtagtttatcatttatagtacttatattattatttttcattattaatgatgagacgaattggatatatgatggtggtttctatttaatatccatattaacgttatttattattgctagtgtcgttcatccatctacatggatagcgaagatattttcaaatccagtgttagtatttatcgggaaaaggtcttatagtttatatttatggcattttgcagtaattagtttcgtacatagttactatgtagacggacagatacctgtatatgtgtactttatagatataagtttaacaattatatttgcagagctatcatatcgctttatagaaactccatttagaaaagaaggtattaaagctttaaattggcgaccttcttatataccacaatttataagaatggcaattgtagtaaccttgttaattccatttatgttgattttagtaggtgcattcaataaatatggtaaagacattattggagaaaaagcgaatagctttgataccacaattgaagataattatttaatgcggatagcaccaattgataacatacacattgatggcttagtaagtgagaagaaaaaggaatcttccgacgtatataataatattaaacctcttttaatcggtgattcagtaatggttgatatcggtgagtcatttaagtcatcagttcctaagtctagaattgatggaaaagtagggcgtcaattgtatcaaaccttacctttagttaaagcgaattattcacaatataaaaaatcatctgatcaagtcgtattagaattaggtacaaatggcgactttactgtcaaacagctcgacgatttacttaatcaatttggaaaagccaagatttatttagttaatacacgtgttccaagaatttatgaggcaaatgtaaatcgattattagctgacgcggcgaaacgaaagtccaatgtcacattaattgattggtataagcgatcacaaggacatagtgaatattttgcaccagacggtgtacatttagagtacaaaggagtcctagctttaaaagatgaaatattaaaagcacttaaaaagaaataacatatgtttaataagtctagttaatgtgtaacgtaacattagctagatttttttattcaaaaaaatatttacaaatattaggaaatttaagtgtaaaagagttgataaatgattatattgggactataatataattaaggtcaaagaaagtcaaagtcaaaagtgcaacttgaccaactctacaaattagaggtgaaattatatggatataaataaaatgacatatgctgttcaaagtgctttacaacaagcagttgaactgagtcagcaacataaattacaaaatatagaaattgaggcaattttaagcgctgccttaaatgaaagtgaaagcttatataaaagtattttagaacgagtaaatattgaggtagatcaattaaacaaagcttatgaagacaaactaaacacgtatgcatctgtagaaggtgacaatatacaatatggtcaatatattagccaacaagcaaaccaattgataactaaggctgaatcatacatgaaagaatatgaagatgaatatatttcaatggagcatattttacgttcggcaatggacattgatcaaacaacaaaacattatataaataataaagtagaagttatcaaagaaattattaaaaaagtaagagggggaaatcacgtgacatcacaaaatccagaagttaattacgaagcattagctaaatatggccgcgacttagtagaagaagttagacaaggtaaaatggatcctgttataggaagagatgaagaaattcgaaatacgattcgtattttaagtcgtaaaactaaaaacaaccctgtgctcattggtgaaccaggtgttggtaaaactgcaattgttgaaggattagcgcaacgtatagttaagaaagatgtgccagaatcattattagataaaactgtttttgagttagatttaagcgcattagtagcgggcgctaaatatcgtggtgaatttgaagagagattaaaagcagtcctaaaagaagttaaagagtctgatggtagaattatattatttattgatgaaatccatatgcttgtaggtgctggtaaaacagatggtgccatggatgcaggcaacatgctaaaaccaatgttagcacgaggagagttacattgtattggtgcaacaactttaaatgaatatcgagaatatattgaaaaagattcggcattagagcgtcgtttccaaaaagtagcagttagtgagcctgatgttgaagatacaatttcaattttacgtggtttaaaagaacgatatgaagtgtatcatggtgtgcgtattcaagatagagccttagttgctgccgctgaattgtctgatcgttacatcactgatcgttttttaccagataaagcgattgatttagttgaccaagcatgtgcaacaattcgtacggaaatgggatcaaatccaactgaattggatcaagttaatagacgtgtcatgcaattagaaattgaagaaagcgcacttaaaaatgaatctgacaatgcgagcaaacagagattacaagaactacaagaagagcttgccaatgaaaaagagaaacaagcagcacttcaatctcgtgtagaatcagaaaaagaaaaaatagcaaatttacaagaaaaacgtgcgcaactagatgaaagtagacaagcgttggaagatgcacaaacaaataacaatttagaaaaagctgctgaactacaatatggaacaattcctcaattggaaaaagaacttagagaattagaggataatttccaagatgagcaaggtgaagatacagatcgaatgattcgtgaagttgtaacagacgaagaaattggcgatattgtcagccaatggacaggcataccagtttcaaaattagttgaaacagaacgtgaaaaattacttcacttaagtgacatcttgcataaacgtgttgtaggtcaagataaagcggttgacctggtttcagatgcagtagttagagcaagagcaggtattaaagatccaaacagacctattggtagtttcttattcctaggtccaactggagtaggtaaaactgaattagctaaatcattagctgcatcattatttgattctgaaaaacatatgattcgtattgatatgagtgaatatatggaaaaacatgcagtatcaagattgataggggcacctccaggatatattggacatgatgaagggggtcaattaactgaagcggttcgtcgtaatccatactcagttattttattagatgaggttgaaaaagcgcatactgacgtctttaatgtattattgcaaattttagatgaaggccgtttaactgattctaaaggacgtagcgttgattttaaaaatactattattattatgacaagtaatattggatctcaagttttattagaaaacgtaaaagagactggtgaaattacagaatcaacagaaaaagctgttatgacaagtttaaatgcatatttcaaaccagaaattttgaatcgtatggatgatatcgtattatttaaaccattatctattgatgacatgagtatgattgtagataaaatcttaacgcaattaaatataagattattagaacaacgaatctcaattgaagtttctgatgatgctaaagcttggctaggtcaagaagcttatgaacctcaatacggtgcaagaccattaaaacgttttgtacaacgccaaattgaaacaccattagcacgtatgatgattaaagagggattcccagaaggtacaacgattaaagttaatttaaattcagacaataacttaacgtttaatgttgaaaaaattcatgaataaaattgaaccaagaatgtgatgattaatcgcattcttggttttttagatttgaaatttattataattgttcattggcaatatactttttaaatgatttaataaacaccaatatttctgggctttcttttttgctgtatatatatgtaaatgaaataggtgcttgtaaaattttcgtgttaataaccgaaatattgtaatcactatttgttgttatataaagaggcaggaatgatataccttgattcatttcgattaatttaattgaagtatgcacatcattgatagatagaaattgtgctttttcataaatatttaaaatattatttttaagtgatgaccaatattctggatggttatcacttattattttgtatttttcaaataaagatgcctcagttagaagatgattattctctttattgggagcaatcaatacaattttaccttcgcatactttttcagaatgaacttctcttagtttaggttgatttctgctaatcccgatgtcatacgtatgattattaatatctttttcaatattttcatttttgacatgaagagaaacatcgataaaaggatgctcgttaaagaaagattttaaaaatttgggcataatgaatgtcgcgatatatgaagacacgacaacatttaatttcgattgaaacatcgtttttttaagttggatatgtttgatgccactttcatattgttcaataaaactttgcgcaattggaagaaatgtatgaccatcttcagtcaagataatttgatttttataagtttcaaatagtttcacattgagatgctgttctaaatttttaatttgcttatgtatagaaggtatagtgagattaatttcttcactagctaatcgatagtttaacgtcttcgctaaaatgacaaatgtatagtaccaatctaaattcatgaacttacctctttcaaaaaagttaataattcattagataatatttaatttttattgcataaaaataatattaatattatatcagaggttatcgagggggtgaagtaatatgattcgaattcaagataatacaataagggatggtatgcaacaaagtaatgttcgaaaaagtctaattataaaaaaagaagtattgaaacaaattaacaagttaaatataaattctgttgaagtaggcatgtgtacaactatcgaggatgaatttaatattcatcaattcagagacattttaagtcctgaaaaagaattagtagtattgactaggcttaatgaaaaagaaataaaaaaaatagtcaaattgaaaattcataatttagtggtaaaaatactattgccaatatctgacttgcatataaaagaaaagcttaatttttcaaataaatattatattcagaaaatcaaagactgcttggatatattaaagaaagataaaaaaggagtagatatttgttttgaagatggaacaaggacttctagagaaaaattgaaagaatacatggaaattatttcaaaatatcaagttagaacagttacatttgcggacactgtaggatgttcgacaccattagaatacggagatatttttaattactttgtaaaaaaatattctaacataattttttctgctcattgtcataacgatctagggttggctactgcaaatacattagctgcaattttaaatggtgcaaagcaaatagaaactacatttttgggaattggtgagagagcgggtaatgctcctattgaggaaataattactattttgacaaaaaaacaaatagaaagtacggaattcactttacccgacgtatataaaactagtattaatatttctaaaattctcgattttcaaatatcagaaaacaaacctataattggtgaaaatatatttaaacatgaatcaggaattcatcaagatggtactaaaaaaaatataaatatgtatcaatatttagttcctagtgatttaggattgaaaaattcacaagttgttcagtttccaataagtaatatttctagtaagaaaatcttgcacaataaatttaaatcaatagttaacactgaagaaattgatgaaaatatttctttctataaacttgtgaacaagttttcacctgaagtagcacctgaagatacagtggatttacttcagataataaaaaggaggagtaaagatggaaattttaaatgattctgtaaaaagttttgaaaaactttatttacaattacaagatggttttccagtgattgttcctactgatactaattataatttatgtagtttacctaacaacgatctttgtatcgataaaatatttgaatataaaaagcgatcgaaagataagccattatcattatttattgataagccagaggattggaaattgtatggagataatcaaaatacggaaatagttgataaactagttgaaatattttggcctggaccattaaatattattttaaaaaataaaacaagctataattatatgctcaataattcagatagtatagctataggatgtgtacaaaataaaacgatgagaagatttatttcatatattaattcacctatagcaattacttcagcaaatatatctggaactgccgatgatattttaataactgaaaatgaagcaattaagcacatgggcgaaaatgtaagatatatgctaagaagtcaaaataaaactaactataaaacatctagtacgattattaaagtgacagataataaaattgaattattaagagaaggagatataaagtttgaagaaataaaagaaagactaggtacaggtattatttatgaataagttaatacttgggatttatttataccgaattttttcacgagcatacttttatttaccgtttttattaatttactttttgattcaaggttattccataatacaattagaaatattaatggcgtcttatggcattgcagcatttttattctctctatacaaagagaagtgttttaaaatttgtaacttaaaagattctaataaattagttgttagtgaaatattcaaaatcatcggtttattgttgttattatatcaaaatcaatatttaattttagtagtggcacaaatattattagggttaagttactcaatgatggcgggtgttgataccgcaataattaaaagaaatataacaaatgagaaatacgtacaaaataagtcaaatagctatatgttcctatcattattaatttcagggattataggtagttatctttatggaataaatattaaatggcctataataatgactggtatattttcaattctaacaattataattattcgatgcacattagttgaaaatagggaattaaatttaataggagaaacaaagggaaagataaagaaatttctaccagaagagaagttttggatattgcattattcttttttaagagcgttaatattaggattttttataggatttattccaattaatatatataatgatttaaaactgaataatttacaatttatttcagtattaacttgttacacagttatgggttttgtatcttcacgttatttaactaaatacttgaattataagtttgtgtcagaaatttgtttagtaatatttttaataatatatacatatcaaagtttcatagcagttactatttctatgatatttttaggtatttcttcagggttaactcgtccacaaactataaataaactttctagcagtagtaacttaagagtgatgcttaattatgcagaaacgttatattttatttttaatatcgcatttttacttatgggtggttacttatatacaataggaactattcaatacttaatattatttatttcgttattaatttttatatatttaataataatattttattttacaaggagagagcaacatgaaaataaaaactgaatttaaagggaacaatataccatatgaatacgcagcaggtgcagatgtgagtgattctattaacgggaatccaattaagtcatttccatttgaagtaattgaattaccggaagggactaaatatcttgcttggtctttaattgactatgatgcaattcctgtatgtggctttgcttggattcattggagtgtagctaatgtaagtgttagtggcaattcaatttctataaaagcagatttatcaagaacaaagggcgactatgtacaaggtaaaaatagctttactagtgggttgttggctgaagatttttcagaaatagaaaatcactatgtaggacctacaccacctgatcaagatcatcaatatgaattaacagtttatgcgttagatcattctttaaatttgaagaatgggttctacttgaatgaatttttaaaagaagtaaatcaacataaaattgatcaaacaagtattaaccttataggaagaaaaatttaatactaaatatctcatcaatataaaattgttcaattaaaagtacaaagaaacaaaggttttaatttatatattaggtacggcgttcgctataatgcaaagaagtaattaaatttaagaaatgtaaacttagttattgtaatgtgaatttatttgaaaaaatagaaagtattaacaattatagcttttacattaattaaaatttatttttaaaaacaagtaaacaatttacatacttataatttttgaaaattttcaatttgtgttatattgattttgtaagatactttaactcacaaaggagagagagtatatgaaattaaaatcatttataactgtaactttggcactgggcatgatcgcaacgactggcgctactgtggcaggtaatgaggtatctgcagcagaaaaggacaaactaccggcaactcaaaaagctaaagaaatgcaaaatgttccatatacaattgcagtagatggcattatggctttcaatcaatcttacttaaatttaccaaaagatagccaattatcatatttagatttaggaaataaagttaaagctttgttatatgatgaacgcggtgtaacacctgagaagattcgaaatgcaaaatctgccgtttacacgattacttggaaagatggtagtaaaaaagaagtggatcttaagaaagatagctacacagcaaacttgtttgattcaaattcaattaaacaaattgatattaatgtaaaaactaaataaacacttaaaattatcaaattcaacatgaagcatttaattttacagtgatgattataaaataattgccttgatacaaagattactcgtaaatgacatctttgtattaaggctttttctaaatttaaaagtgatgggttagaggtcattgagctttaaaatattcaaaatacaaaacattaatggccaaaaataaaagccgcctttatctgggcagcttcaataataagaaagacatatttcattttatactaaatagttattgtgatgaatctttcggcggtttaattactgcagcaaaaattgctgtgaaaatcgtgaacaatactgccatgataattggattcactacatttaagctgtctccacctactaggctattaagtacaaagttaaccatttgcattaataataatgcccaaaagaatgttacgaggtgtttcatgtcattctacctccactttaattatatatattttattttaagtgaaagttagaaatttgtatagtaacatctcatatattttgaccatattatacagtttaaataaatgattttatctgaatggctattctaaattaagcgcattaaaaccaatttcatactgaaatttgacgataataaagcattaaaattttattaactagtcaatattcctacctctgacttgagtttaaaaagtaatctatgttaaattaatacctggtattaaaaattttattaagaaggtgttcaactatgaacgtgggtattaaaggttttggtgcatatgcgccagaaaagattattgacaatgcctattttgagcaatttttagatacatctgatgaatggatttctaagatgactggaattaaagaaagacattgggcagatgatgatcaagatacttcagatttagcatatgaagcaagtttaaaagcaatcgctgacgctggtattcagcccgaagatatagatatgataattgttgccacagcaactggagatatgccatttccaactgtcgcaaatatgttgcaagaacgtttagggacgggcaaagttgcctctatggatcaacttgcagcatgttctggatttatgtattcaatgattacagctaaacaatatgttcaatctggagattatcataacattttagttgtcggtgcagataaattatctaaaataacagatttaactgaccgttctactgcagttctatttggagatggtgcaggtgcggttatcatcggtgaagtttcagatggcagaggtattataagttatgaaatgggttctgatggcacaggtggtaaacatttatatttagataaagatactggtaaactgaaaatgaatggtcgagaagtatttaaatttgctgttagaattatgggtgatgcatcaacacgtgtagttgaaaaagcgaatttaacatcagatgatatagatttatttattcctcatcaagctaatattagaattatggaatcagctagagaacgcttaggtatttcaaaagacaaaatgagtgtttctgtaaataaatatggaaatacttcagctgcgtcaatacctttaagtatcgatcaagaattaaaaaatggtaaaatcaaagatgatgatacaattgttcttgtcggattcggtggcggcctaacttggggcgcaatgacaataaaatggggaaaataggaggataacgaatgagtcaaaataaaagagtagttattacaggtatgggagccctttctccaatcggtaatgatgtcaaaacaacatgggagaatgctctaaaaggcgtaaatggtatcgataaaattacacgtatcgatactgaaccttatagcgttcacttagcaggagaacttaaaaactttaatattgaagatcatatcgacaaaaaagaagcgcgtcgtatggatagatttactcaatatgcaattgtagcagctagagaggctgttaaagatgcgcaattagatatcaatgaaaatactgcagatcgaatcggtgtatggattggttctggtatcggtggtatggaaacatttgaaattgcacataaacaattaatggataaaggcccaagacgtgtgagtccatttttcgtaccaatgttaattcctgatatggcaactgggcaagtatcaattgacttaggtgcaaaaggaccaaatggtgcaacagttacagcatgtgcaacaggtacaaattcaatcggagaagcatttaaaattgtgcaacgcggtgatgcagatgcaatgattactggtggtacagaagcaccaattactcatatggcaattgctggtttcagtgcaagtcgagcgctttctacaaatgatgacattgaaacagcatgtcgtccattccaagaaggtagagatggttttgttatgggtgaaggtgctggtattttagtaattgaatctttagaatcagcacaagctcgaggtgccaatatttatgctgagatagttggctatggtactacaggtgatgcttatcatattacagcgccagctccagaaggtgaaggtggttctagagcaatgcaagcagctatggatgatgctggtattgaacctaaagatgtacaatacttaaatgcccatggtacaagtactcctgttggtgacttaaatgaagttaaagctattaaaaatacatttggtgaagcagctaaacacttaaaagttagctcaacaaaatcaatgactggtcacttacttggtgcaacaggtggaattgaagcaatcttctcagcgctttcaattaaagactctaaagtcgcaccgacaattcatgcggtaacaccagatccagaatgtgatttggatattgttccaaatgaagcgcaagaccttgatattacttatgcaatgagtaatagcttaggattcggtggacataacgcagtattagtattcaagaaatttgaagcataactataaaaatcttcagtaacgttgttttagttactgaagattttttcagtttctttatactaagatgagcgacagcacaatcgtcataataaaatataaaatatttattaataataaggggattatccatgtagaaacaaagtaatgctctttttttacctcttgtgggttgaaaaatggatcatcagagatagacttcttctttttcgaagatgacatttgatactttaatcttctaaaaccataacttgtcgcatcaaaaatgccttcttgtacaagtaaaatcaaaaatatgctaataaaaataattaatgaaacataaaacaatatatttaaatatgtaatgatagtatggctattaaaaagccatataataaacgttaatattggcgttattagtgccattccaagccattttttcaacatttgatcactcccacttatagaaaactcttacgcatagtttacattaaaatcagacattgaggaatgattttttaatttcttcagctttattgaaattctaaaatcaatcattcttcattagtttaaagcaaaaaaatattgatatatagtaaatattgtatatataatattagttaagatttcagaaaattttgaagggaatggaaatttagaaatcggaatttgttagaggaggggattagatggggaaatatattttcaaacgatttatttatatgcttatttctttatttattattattacaattacatttttcttaatgaaattaatgccaggttcgccatttaacgatgctaaattaaatgctgaacaaaaagaaattttaaatgaaaaatatggattaaatgatcctgtagctacgcagtatttacattatttaaaaaatgttgttacaggcgattttggtaattcattccagtatcataatcaacctgtgtgggatttgattaaaccgagactactaccttcttttgaaatgggtcttacagcaatgttcatcggtgtgatactgggacttattttaggtgttgcagcagctactaaacaaaattcttgggttgactatacaactacagttatttcagttattgcagtatctgtaccatcttttgtacttgctgtacttttacaatatgtatttgcagttaaattaagatggttcccagtagctggatgggaaggtttttcgaccgcggtattaccgtcacttgcattatctgcagctgttttagcaactgtcgccagatacataagagcagagatgatagaggtattaagttcagactatattttattagcgagagctaaaggtaattcgacaatgcgtgtactttttggacatgcacttagaaatgctttaattccaattattacaattatcgttcccatgttagcaagtattttaacaggcactttaacaattgaaaatatttttggagttcctggattaggggatcaattcgtacgttcaattacaacaaatgatttctcagtaatcatggcaatcacactattatttagcacactgtttatcgtttctatttttattgtagatattttgtacggtgtgatagatccacgaattcgtgttcaaggaggtaaaaaataatggctgaaaataaaaacaatttgtcgattaacgacgatcattctaatgcagctatgacgcatacctctgacgctatcgcatcatctgattttattattagagaattagatttgaatcaggaacctgaaatgcaacgagaaagcaaaaacttttggcaagatgcttgggctcagttaaaacgaaataagttagctgttgtcggtatgataggtttaattatcattgtaatatttgcttttatcggtccagttataaataaacatgattatgctgaacaaaatgtagaacatagaaatcttccggcaaaaatacctgtattagacaaagttccatttttaccttttgatggtaaagatgcagatggcaaggatgcttataaagcagcaaatgctaaagaaaattattggtttggtactgatcagttgggtcgagatttatggacaagaacatggaaaggtgctcaaatttcattgtttatcggtgttgttgcagcgatgttagatatttttattggtgttgtatatggtgcgatttctggattcttcggtggacgtgtcgatacgattatgcaacgtatacttgaagtcatagcatctattccgaatttaattgtcgtaattttatttgtattaatttttgaaccatccatttggacaattatattggctatgtctatcacaggctggttaggcatgagcagagttgtacgtggagaatttttaaaattaaaaaatcaagagtttgtcatggcttcgaaaacattgggggcttcaaaattcaaattgatatttaagcatattttacctaatacattaggtgctatcgtggttacatcaatgtttacagtacctagtgctattttcttcgaagcatttttaagtttcattggtataggtgtacccgcacctcaaacatcgttagggtcattagtaaatgatgggcgcgcaatgttattaatttatccacatgaattatttataccagcaatgattttaagtttattaattctattcttttacttatttagtgatggattacgtgatgcatttgatccgaaaatgcgtaaataaaaagggggcatagcatatgactgaaagaatattagaagtaaatgatttgcatgtttcctttgatattacagcaggggaagtgcaggcagtgagaggcgtagatttttatttgaacaaaggggaaacattggcaattgttggtgaatcaggttcaggtaaatctgtaacaacaaaagcaattacaaaattattccaaggggacacaggaagaattaaaaagggagaaattttatttttaggggaagatttagcaaaaaaacctgaaaatgagttgattaaattacgtggcaaagatatttcaatgatctttcaagatccaatgacatctttaaacccaacgatgcaaattggtaaacaagtcatggaaccattaattaagcacaaaaattatagtaaagcacaagctaaaaagcgcgcattggaaatactaaatcttgtaggtttaccaaatgcagaaaaaagatttaaagcatatcctcatcaattttcaggtggacaaaggcaaagaattgttattgcaaccgcattagcttgtgaacctaaagtgctcattgctgatgaaccaacgactgcattagacgtaacgatgcaggcacaaattttagatttaatgaaagaactacaacaaaaaatcgatacagcaattatttttataacgcatgatttaggggttgttgcgaatattgctgatagagtggcagttatgtatggtggtcaaatggttgaaacaggagatgttaacgaaatattttatgatccaaagcatccatatacatggggattattatcgtcaatgcctgatttatcaacaacaaatgacacaccattactagcgattcctggagcgccacctgatttattacacccacctaaaggtgatgcatttgcgagacgtagtcaatatgcattagatattgattttaaagtagaaccaccgtggtttaaagtttcaccgacacattttgtgaaatcttggttattagacgcacgtgcaccaaaagttgaactacccgagctggtaaaacaacgtatgaaaccgatgcctaataattatgaaaaaccactcaaggtagaaagggtgtcgttcaatgaaaaatgatgaagtgctattatctattaaaaatttaaagcaatattttaacgcaggaaagaaaaacgaagtgagagcgattgaaaatatttcgtttgatatatacaaaggggaaacattaggtttagtaggagaatcggggtgtggtaaatctacaactggtaaatcaattattaaacttaatgatattacaagtggagaaattttgtatgagggtattgatatacaaaagattcgtaaacgtaaagatttgcttaaatttaataaaaagatacagatgatttttcaagacccatatgcgtctttaaatcctaggttaaaagtaatggatatagtagctgaaggtattgatatccatcatttagcaactgataagcgtgaccgaaaaaaacgtgtctatgatttacttgaaactgttggattaagtaaagaacatgccaatcgctatcctcatgaattttcaggtggacaacgccaacgtattggaattgcccgtgcattagccgttgaaccagaattcattatcgcggacgaaccaatatcggcattggatgtttcaatccaagctcaagtagttaatttattattaaaattacaacgtgaaagagggattacgttcctatttatagctcatgatctatcaatggtgaagtatatttcagatcgtattgcagtcatgcattttgggaaaatagttgaaattggaccggcagaagaaatttatcaaaatccattacacgattatactaagtctttattatcagccattccacaacctgatcctgaatcagaacgcagtcgcaaacgatttagttatattgatgatgaagcaaataatcatttaagacaattacatgaaattagaccgaatcactttgtctttagtactgaagaagaagcggcacaactacgagaaaataaattggtgacacaaaattaaggggaagggggaaatgcaatgacgagaaaatttagaacacttattttaattttgattgctacaattgcattaagtggttgtgctaatgacgatggtatttattcagataaaggtcaagtattcagaaaaattttgtcatcagacttaacatcccttgatacatcattaataacggatgaaatatcttctgaagtgactgcgcaaacattcgaaggtttatacacattaggaaaaggtgacaaaccggtgttaggtgttgcgaaagcttttcctgaaaagagtaaagatggtaaaactttaaaggttaaattaagaagcgatgctaaatggagcaatggtgacaaagtgactgcacaagactttgtttatgcttggagaaaaacagttgaccctaaaacaggttctgaatttgcatacattatgggggacattaaaaatgcgagtgatattagtactggtaagaaacctgtagagcaattaggtatcaaagcattaaatgatgaaacattacaaattgaattagaaaagccggttccatatattaatcaattattagcacttaatacctttgcacctcaaaatgaaaaagttgccaaaaaatatggtaaaaattacggtacggcagctgatagagcggtatacaatggtccatttaaagttgatgattggaaacaagaagataaaaccttactatctaaaaatcagtattattgggataaaaagaatgtaaaattagataaagtgaattataaagttattaaagacttacaagccggtgcatcattgtatgatactgaatcagtagatgacgcagttattactgcagatcaagtaaataaatataaagacaacaaaggattaaactttgtgttaacgactgggacattttttgtaaaaatgaatgaaaaacaatatcctgattttaaaaacaaaaatttaagattggctatcgcacaagcaatagataaaaaaggatacgttgattcagtgaaaaacaatggctcaattccttccgatacactaacagccaaaggaattgcgaaagcgcctaatggcaaagattatgcgagtaccatgaattcgcctttaaaatataatcctaaagaagcaagagcacactgggacaaagctaaaaaagagttaggtaaaaatgaagtgacattttcaatgaacacagaagatacaccagatgcaaaaatatctgctgaatatatcaaatcgcaagttgagaaaaatttaccaggagttactttgaaaattaagcaattaccgtttaaacaaagagtatcactagaactgagtaacaattttgaagcatcacttagtggttggtctgcagattaccctgatcctatggcttatttagaaacaatgaccacaggtagcgcacaaaataatacagactggggtaataaagaatatgatcaattacttaaagtagcaagaaccaaattggcacttcaaccgaacgaacgatatgaaaacttgaaaaaagcagaagaaatgttcctaggagatgcaccggtagcaccaatttatcaaaaaggtgttgcacatttaacaaatcctcaagtaaaaggattaatttaccataaatttggtccaaataactcacttaaacatgtatatattgataaatcgatagataaagaaacaggtaagaagaaaaaataatatgctttgtaaattaggctggagacatatctccagtctttttgtgttggataaaaactttgggaataaaaatttaaaataagtcgttttttaaattactgaaattgattaaatgcataaataactgaatattctaaaaataaacttgtaataattttttctatgagtaaactaaaaagaaaaaattagattgaaagtaggaggcatatgtatggggaagctaattaaatatatttcaatacttcttattgtcgttttagtgttgagtgcttgcggaaaaagcagtaataaagatgaaggagtaaaagatgctactaaaacggaaacctcaaaacataaaggtggtaccttaaatgtagcattaacagcaccgccaagtggtgtttattcttcgttattaaatagtacacatgcagattctgtagttgagggatattttaacgaaagcttattagcaactgataaaaaaatacgtcctaaggcatatattgcttcatggaaggacatcgagccggctaagaaaatagaatttaaaattaaaaaaggtattaaatggcatgatggtaatgaattgaaaattgatgattggatttattcaattgaagtcttagctaacaaggactacgaaggtgcttattatccaagtgtagaaaatatccaaggtgcgaaagattatcatgaaggaaaaactgatcatattagcggattgaagaaaatagatgactacactatgcaggttacatttgataaaaaacaagaaaattacttaacaggatttattactggacctttattaagtaaaaaatatttatcagatgtaccaattaaagatttagcgaaatcagataaaatccgaaaatatcctattggtattggaccgtataaagttaagaaaatcgttccaggtgaggctgttcaactcgttaaatttgatgattattggcaaggtaagcctgcactagacaaaatcaatttaaaagttattgatcaagcgcaaattattaaggcaatggaaaaaggcgatattgatgttgcgaatgatgctaccggtgcaatggcaaaagatgctaagtcatctaatgctggtctcaaggtattatctgcgccaagcttagactacggtttaataggattcgtatctcatgattacgataaaaaagctaataaaactggtaaagtgagaccaaaatatgaagacaaagaattacgtaaagcaatgctttatgcaattgatagagaaaaatggatcaaagcgtttttcaatggttacgctagtgaaatcaatagttttgtaccatctatgcattggatagcagccaatcctaaggacctaaatgattacaaatatgatcctgaaaaagctaaaaaaatcttagataagttaggttataaagatagagatggtgacggatttagagaagatcctaaaggtaataaatttgagattaactttaaacataattcaggttctaatcctacttttgaaccaagaactgctgcgataaaagatttctgggaaaaagttggcttgaaaacaaatgtgaagttagtagaattcggtaaatataatgaagacttagcaaatgcatctaaagatatggaagtgtacttcagatcatgggcaggaggtacagatccagatccatcagatttataccacactgatagacctcaaaatgaaatgagaacagttttaccaaaatcagatcaatatttagatgatgcattagacttcgaaaaagtaggcattgatgaaaagaaacgtaaagatatttatgttaaatggcaaaaatatatgaatgatgagttacctggattaccaatgttccaaggtaaatcgataactattgttaacgataaagtacgaaacttagacattgaaattggaactgatcaaagtttatataatttaactaaagaagcttagtaatgtaacctcgacgattttgtcgaggtttacttatatggggggatgttatgaataatgtattgttagaggttaaagatttagaaacatcattaaaaataaataatgaatggttagcaactgttgaaaatatttcttttgaattatctaaaggagaagttttgggtatagtaggggaatctggttgcggtaagtccatattaagtaagtcaattattaaattattaccagaaaagatatctaaactaagtaatggagaagttatatttgatggtaaacgaatcgatacgctcaatgagaagcaattgctagatattcgaggaaatgatattgctatgatttttcaagaacctatgactgctttaaatcctgtatttaccataaaaaatcaacttgtggaatctataaaatcacataaaaaaatttctaaaaaagaagcaaataaattagcaaaagatttactaaaaaaagttggaattgctagacaagatgaaatattaaatagctatcctcatcaattatctggtggtatgagacaaagagtaatgattgcaatggccatttcatgttctcctaaattattaattgctgatgaacctacaacagcattggatgtcacgattcaagcgcaaatattagacttattaaaagaattgcaaaaggaaacgcaaatggcaattatgatgattacacatgatttgagtgtagttgctgagttttgcgataaagtcttagttatgtatgcaggtcaaattgtagaatttggaggcataaaagaaatactacacaatccgaaacatccttatacccaaaaattattatcaacaattccaaaacttaaagaagagcagaaacgacttgaaacgatagaaggaattgtgccatcaatccaagcatttcacgttaataagtgcagatttgcaaatagatgtaacaaaaaactggatatttgtaataatcaatctcctaaaatgcatgtttgtgaagacgtcattgtacgttgtcatttgtacaaaaatgaatataaggagatataagaatggaaaatattttagaagtcaaccaaataaaaaaatactacaaaattaaaactggattattacaaaaaactcagtacgttaaagctgttgatgacgtatcgttttcaataaaaaaaggacaaacttttggattagtaggagaatcgggttgtggtaagtcaacgttaggtaaagtgattatcaggcttgaagatgcaacttcaggctcaataattgttaatggtgaagatataacaagattacaaggtaaaaaactcagaaaatcacgacaacaatatcagatgatatttcaagatccgtatgcatcattgaatccgatgcaaatggttggagatatcatttcagaacctattttaaattataaaaaattgccaaaagaagaaataaaaaaagaagtactatatttattaaaatgtgttggcctaagtgaagatgcatattataaatatgcacatgaattttcaggtggacagagacaaagagtgggaattgcaagagcattggctttgcgtccgagtttaattgttgctgatgagcctgtaagtgcattagatgtatctgttcaatctcaagtactgaatttattaaaagatttacaagaacaatttaacttaagctatttatttatcgcacatgatttaagtgtagtaaaacatataagtgatgtcattggagttatgtatttaggtcatatagttgaaatcgcatctgataaagaaatttatgaaaatcccaaacatccatatacaaaagcgttgatttcatcaataccacaaattgataaacataataacaatagaattatattaaaaggagaattaccttcgccaagtaatccgccgcaaggttgtccttttcatacaagatgtccaattgctcaagatatgtgcaaaaaaagtatgccagaattaaaggacattggtaatgaacatcaagttgcttgtttctacgtagataaagtaggtgatttaaatgattaaattaatacttaaaagattagggttaatgatcccgttactaattttaatctcaatagttgtattttcattagcaatcatacaaccaggagatccattttcagatctacaaaacggtaaaataaaacaagaagcaataaatgcacaaagggaaaaattaggtctcaacgactcaataccacatcaatacattagatgggtcaatcatgttatacacggtgatttaggggagtcaatcaaatataaaaggccggtaattgatgttattgaggaaagaattccaaatacaatattactcggtgctatgtcattaattattacttatattatctcatttgctttaggaataacgtcaggtagatattcttacagtttgacggattatactgtgcaaatatttaattatttgatgttagccattccatcttttattgcgggagtatttgcaatttttattttttcttttgaattacaatggttcccgtttcaaggttctgttgatattaaccttaaagaaggtacttttgaatattatatgagtaaaatatatcacacatttttacctgcattcactttaggtttattatctactgctggttatattcaatatttacgtaatgatattattgaaaattctaaaaaagattatgtattgacggcaaggtcaaaaggattatctatgaataaaatttataataaacatatattgagaaattctctaatacctattattacatttttaggtgctgatattgtaagtattttaggtggagccgtgattacggagactatcttttcatataacggtatcggtaaattatttttagaatcggtaataggccaagactatccattaatgatggcattaacgttatttttctcatttttaggtttactgggtaatttgatttctgatattacttatggatttatagatccaagaattagaagtaactaggggggattagaatgcaaaataagtcaaaatcgccttttaaaattgcattttctaaatttattcataataaaattgcaatgttatcggttatttttttattaatcataactattgtatcaattatagcgccattaatagctccttttccagtgaaccaacaagatttattaaatataaaaggtgaaatgacagcacaaaacattcttggtacagactctggtggtagggataactttagtcgtttgttatatgcaggtcgtatttcattatccattggaattacatctacaataggaatgcttttgattggaattacagttggagtgatttctggttattttggaggtattgttgatacattattaatgagaataaccgaatttgttatgttatttccatttttaatatttgcaattgtattaaatgctgcacttggagataaaattaaaaatccttatggatctgccataattcttgttctagttattatcgtattaagttggggaggtattgcaagacttgttcgtggtaaagtacttcaagaaaaagaaaatgaatactttttggcagcaaaatcaattggtacacccacatataaaattattttgaaacatcttttgccgaatatattaagtgtagttatcgtacaagcaacattgttatttgccggtatgattgtagtggaatcaggattgagctttttaggattcggaattagtaaagcaataccatcttggggtaatatgttgagtgatgctcaagaaggggatgttataagtggtaaaccgtggatatggatgccacctgctataatgattacattaactatattaagtataaactttgtaggggaagggattaaagatgcttttaatcctagaggtagacgttaaataataaaagaggcactagttaattctagtacctctttattttatctcttacgtcctaaacccatcgctttttccatttttttgacagttttaaatgaaactttgtgtgctttatctctaccttgatctaaaatatcatcaagtttatctgagttatagaaactttcgtatttttcttggaattctactaaaaatgctttaactatttcagcaaggtcacctttaaatttaccataaccttcgccctcatattttgcctcaatatctttaattggcatgtctgttaatccagcgtatattgaaattaaatttgttatacctggcttgttgtcacgatcaaatttaataataccatctgaatcagttactgcgcttttaatttttttagctgcaacattcggctcgtctaataatgaaatgaagtttttagcattatcatcactcttactcatttttcttgttgggtcttgtaaactcatgacacgtccaccaactttaggcatacgaatttcaggtttcacaagcacatcattatagcgactattaaatctatctacaaggttacgagtcaattcgatatgctgcttttggtcatctccaactggaacgatattagtattgtaaagaacaatatcagctgccattaaaggtggatatgttaatagaccagcaggtataccttcaactgctttctgagctttatctttgtattgcgtcatacgctctaattctccaacagaagcaatcgtagttaacatccatcctgcttgtacgtgtgcagggacttcagattgtatgaacaatgttgctttgtctggatctataccagaagctaaataaatcgctgctaattgtctggtctgtttacgtaattttaaacgatcttgtggcattgtaattgcatgttgatctacgatacagaaataacaatcatagtcattttgcacatcaacaaattgttttagtgcgccaatataatttccaatagtaggaattccactaggttggatgcctgaaaataatgtctccatttaaatgcctactttcttagtaatattttaataattatcattataacagtatttcttaaaaatgtaagatgtgttagaatatacgtataacttactactaacaaagggattaataatcttttttataagtgtagaaacttatctgaaaaattaggtttttctcatttaattttaatgttagatagttataataaatagtaacgattaagaattttagaaaaaaatgttttttcttgatctataactaaattttaagcaatgaattttattcattcaaataggagagtgagatgtatggtaacattatttacttcaccaagttgcacatcttgccgtaaagcgaaagcatggttacaagaacatgacattccgtatacggagcgtaatattttttctgaacatttaacaattgatgaaattaagcaaatattaaaaatgactgaagacggtactgatgaaatcatttctacacgttctaaaacataccaaaaattaaatgttgatattgattcactaccattacaagacttatattcaatcattcaagataatcctggcttattacgtcgtccaattattttagataataaacgactacaagttggttataatgaggacgagattcgacgtttcttacctagaaaagttcgtacgttccaattacaagaagcacaacgtatggttgactaataaccatttaactatgtgtcatactttactaaaagatatgtcaagcaacactatttctatagtgttgcttttttggttttaattttacaataattgcttagtatcttttaaatcaaatgtgcaattgttaatatagctctatattagagtgttttggatgaaacatttgctatgataaggtaaaattaaattaagaaagtgctttaatgctttaactgtataaatcatttaaatagttttgctacaacgaatatgttattataagttaccaaaatattttagagaaagaaatcaaacaaataaattgtattttgtttgatgctttaatacaatgtggatactattcatcgactgtaaggagtgagatgatatgagaatagaacgagtagatgatacaactgtaaaattgtttataacatatagcgatatcgaggcccgtggatttagtcgtgaagatttatggacaaatcgcaaacgtggcgaagaattcttttggtcaatgatggatgaaattaacgaagaagaagattttgttgtagaaggtccattatggattcaagtacatgcctttgaaaaaggtgtcgaagtcacaatttctaaatctaaaaatgaagatatgatgaatatgtctgatgatgatgcaactgatcaatttgatgaacaagttcaagaattgttagctcaaacattagaaggtgaagatcaattagaagaattattcgagcaacgaacaaaagaaaaagaagctcaaggttctaaacgtcaaaagtcttcagcacgtaaaaatacaagaacaatcattgtgaaatttaacgatttagaagatgttattaattatgcatatcatagcaatccaataactacagagtttgaagatttgttatatatggttgatggtacttattattatgctgtatattttgatagtcatgttgatcaagaagtcattaatgatagttacagtcaattgcttgaatttgcttatccaacagacagaacagaagtttatttaaatgactatgctaaaataattatgagtcataacgtaacagctcaagttcgacgttattttccagagacaactgaataacgatattaattaagcaacgcactatgaaaggagactctttggagtctctttttttattgatttcaaaagctgaaaaagtaatagtagttaaacttacgtgtaatattttgaggtgaagatatgttagtagctttaaatgaagaaaaggaacgcgtattagcaactactgcattgagaaagacacaatatttttgtccggtgtgtggcaagcaagttattttaaagcgtgggctcaaagtaattagtcattttgcacataaacatttagcggaacaaaaatgttttaataatgaaacgattaaacattataaaagtaaattgattttagcacagatgatacagcaacaaggatgtaaagtagagatagagccatttttaaaagaaataaaacaaattccggatattttgattaataataaatatgttattgagctacagtattcgccaattccttataaacagattcttcaacgaacggaaggtttaaagaaaatgggatataaagtaagttggttattaaatgatgttgattattgtcataataaagtgaagttcaatcattttcaaagtatgtttattaatccattcactcgaaaacttcatacgttcaatttagagaaaaaacaaataatgatgtttcaacaaatacaatatttaggcgggcacaaatatgtcgctgaaaaaagaaatgccaaaattagtgagttgtttaatgaggcgccttgtgattatcatgctgtttataaattatcaaagttcgcaattaatcaatatatcaaatattgtcgctggcaaaattctgttttagaacccactttaagtgcaatgtatcaattacagttaactgatcaagaagtagtgcacaattatggttatatttttccagagcaaatttatattaaaaatcatcctattgagtggcaattacaagttgatttatggttaaagaatggaaaaagcaaattagtaaatgacaatcttaattattttaaactgaaaaaatttattgttgctctagaaagtaaaacagcaattatagaaaaacttattaacaattatttaaatatttgttcagataaaggtaatgacgtgcaaattttgttctaaaatgagaaaattatatcaattatattttattaggaggtttactacatatgagtcaacaattatcgagagaagaacaggaacgtaaatatcctgaatatacatgggacttaacaacaattttcaaagatgatgaagcttttgaggctgcatttaaagaagttgaaaatgagttaggcaaagaagaacaatttaaaggacacattggtgatagtgctgagacattatacaatgcgttagaattagaagatacattaggtactaaattagaaaaagtatatgtatacgcgcacctaaaacaagaccaagatacaacgaacgacaagtatactggtatggagtcaagagcacatcaattaattattaaatttagctcggcatggagtttcttagtgccagagattttacaaattgatgaagataaaattcaatcatttgtaaattcatatgataaattacaaaaattcgcatttgatttgaagttgattaatgaaaaacgtcctcatattttagatgctgaaactgaaaagttattaacagaagcgcaggacgcgttatcaacgccatcaaatgtatacggtatgtttagcaacgctgatttagtatttgaagatgcgatagataaagatggaaatgcacacccgttaacacaaggtacatttattaagtatttagaaacagatgatcgcaaactaagagaaagtgcttttagaaatgtatataaagcatatggtgctcataataatacgcttggcgctacgctagcaggtgaagtgaagaaaaatgtatttaatgctcgtacacacaattacaaaactgcaagagaaaaagcattgagtaataatcatattccagaaaatgtatatgacaatctagtaaaaactgtacataaatatttaccattgctacatagatatactgaattgcgcaaagaattgctaggtttagatgacttgaaaatgtatgatttatatacaccattaattaaagatattaagtttgaaatgccttatgaagaagctaaagagtggatgttaaaagcattagaaccaatgggtgaagaatatttaaatgtagttaaagaaggcttaaacaatcgttgggtcgatgtctatgagaataaaggtaaacgttcaggtggctattcatcaggtgcacatttaactaatccatttattctacttaactggtctaatactatttcagacttatacacattagttcatgaatttgggcattcagcacatagttacttcagtagaaaattccaaccgtcaaattctagtgactacactatttttgtcgctgaagttgcatcaacttgtaacgaagcacttttaagtgattatatggataaacatcttgatgatgaaaaacgcttattattattaaaccaagaattagaacgtttcagagctacattattccgacaaacaatgttcgcagaatttgagcataaaattcatgcaattgaagaagcaggtgaaccattaacgccaactagaatgaatgaagaatatgccaaattaaataaattatacttcggtgattctgtagaaactgatgaagatattagtaaggaatggtcacgtattccacacttctatatgaattattatgtatatcaatacgcaactggttacagtgcagctcaaagcttaagtcatcaaattttaacagaaggtaagccagcagtagatagatatattaatgaattcttgaaaaaaggtagctcaaattatccaattgagatattaaaaaatgctggtgtagatatgacaacacctgaaccaattgaacaagcttgtgaagtttttgaacaaaaattgaacgcttttgaaaaattaatgaaagcttagtactattgtattcgcttacattatgaacagattgtgacaatttaaattaagtactattaaaaggttgaaatggtagagatagcatgttatattatgaacatgaaattaatcacataacaaacatacccctttgtttgaagtgaaaaatttctcccatcccctttgtttagcgtcgtgtattcagacacgacgtttttttatgttcttttttaataagagggaagtgaagttgtataaaaatgtattaaatatgcactttttatacattaacgattcatatatgtctattatgtaccaaatttataatttgtataattttcgaactggttaaattcgaaaaatatcactaatatatttagatcgatgtgtaacattacgttctaataatttaatgttgcaaaattaagagtcagtaaaaagacctcgttacatttatggtgtacgaggtctttaatttatttattttgatttgattttaggcattttagatttccagaaatcgccatctggatatttaagtttttcaattttttgttgaatggctaacttctttaactctttgtttaaaagtttttctggccattcataaatagtaagtaattcttccatcgttacaagttgttgttgctgtatataagtttctaatttaggaggaagattcttttcgataggtttacccatcaattcattaattatataagtatagatgtgatatgggtataatccttcgacttttaaaccttcttcatgaacatcttcactaaagaaaacgagagaaggggcttgttcgatttccatttctcttgcaatatgcaaatcaattttcaagctttcggttagtttacttttttgtaagtcgtctttaaatacttctaaatcaatacctgcattttgaatacagtcacaaatcattgattctgtaataatatctcttttaggtatgatttcattttgcattaaatgtataaatcgttcggcacgtacacgaccttgtaactcagctgctttataagctagggcgatgttatcaaagttggatgtactttgagcttggcatttcgttaatacttttaacgaaggatttaatatatgtctgatacgtatatattgattatattcaattcttaatttggataagattgctgataatttgaagcaatcggagctaaatggatcgaaaaatgaataaatttcgattttacttacaggtgatagattgatatcttcacgactcttattttccattattcgtaattctccagccatgtttattcacctacaattaattttaggaattcaccatatgattagcagttaatcttaagcgctcaaataaataatctccaacaccttgtggaaacgcagcgcgattaattgctgtctgcatattttctaaccatgcatctctttcaaattcagtgattgtaaaatctatatgtctttttcttagcataggatgtccgtgttcttcggtataaatgtttggaccgcccaaaaactgtgttaaaaattgtttttgtttacgacttgtttctgcaaaatctcctggaaacaggtgattaagtcgttcatctttttctacaagggtgtaaaaataatcaatcatatcgtataacgcttctttaccaatgatgtcatatggtgttgttgtcatttaatcacccattttcaaaaatttactgttacgaacttaagttaatatataactaatataacatgattttaaacatttgaaagaaatatgcatatttgccaatttaatttatattgtttgaaagtgtttcttttttcttgaaaaaacgttgaactttatttaaaggttgatgatgttcgaggtttagttcgtttaataaagattggaacttttgtaaaccttgattatagtctttaacttcgaactctaactcataatccgtagtatcgaaatactcacttttatctaaaaccagtaaatcacctttatatttagtttcttggcgatatgtcgttaatgcaccaagtattgataaagttgtatcttttacaccaaactgttcaactataatttgacgaatgtcatctggaagattgtcgtttgaaataatcaagttcatctctggtttaatgtcgacgatatagttgtattctaatagaccaacctttgctggtgtctttaaagtcatttcatattgattgtctttaactcttatgcgtagtgcagagcgatgttcctttaatttgaaatcgggtgtatcaatatagtaattgacttgcttaaaaagcacactgtctttaaaatatttctcttgcaatttattatagattgatgcagttatcatttgtttaaattctatttcatgatttgttgccatgatatgtatacacctcgtatcaaattcaatttatcttaactatattatgaatgacaaagttgaattttaaaagtaatttcctttatctattatcaatgttaatttgaccattaaaaatagtgttcgtaagtgttttgtattattgaattgtgttaaaatgttatggaataagaggaggattaagcatgcgtttatatattaatgaaattaaaattaaagatgacatactttattgttatacagaagattctattaaaggattatctgaagtaggacaaatgctcgttgatagtgataattatgcctttgcgtatacattagatgatggtaaagcgtatgcttatctcattttcgtacaagaaacatggacgatgttgcatgaaaacatgactaaaaaaattattatcaatgatgaactagaattgactgaattccaccaagaacttacttatattttagacaacataaaagggaataataattatggtaaggaatttgttgcaaccgttgaagaaacattcgacattgaataaagcggggtgaagcactatgaatcaatgggatcagttcttaacaccttataagcaagcggttgatgagttgaaagtgaaacttaaaggcatgcgcaaacaatatgaagttggtgaacaagcgtcgccaatagaatttgttactggtcgtgttaaaccaatcgctagtattatagataaggcaaacaaacgacaaataccatttgataggttaagagaagaaatgtacgatatcgctggtttaagaatgatgtgccaatttgttgaagatattgatgttgtcgtcaatattttaagacaaagaaaagattttaaagtaattgaagaacgagattatattcgtaacactaaagaaagtggttaccgctcgtatcatgtcattattgaatatccaattgaaacattacaaggccaaaaatttatattggctgagattcagattcgtacattagcaatgaatttctgggcaacgattgaacatactttacgatataaatatgatggtgcttatccggatgaaattcaacatcgtttggaaagagcggcagaagcagcgtatttacttgatgaagagatgtctgaaattaaagatgaaattcaggaagctcaaaaatattacacgcaaaaacgttctaaaaaacatgaaaatgattaacgaggtgttataaatcatgcgttatacaattttaactaaaggtgactccaagtctaatgccttaaagcataaaatgatgaactatatgaaagattttcgcatgattgaggatagtgaaaatcctgaaattgttatttcagttggtggtgacggtacattactacaagcattccatcagtatagccacatgttatcaaaagtggcatttgttggagttcatacaggtcatttaggattttatgcggattggttacctcatgaagttgaaaaattaatcatcgaaattaataattcagagtttcaggtcattgaatatccattgcttgaaattattatgagatacaacgacaacggctatgaaacaaggtatttagcattaaatgaagcaacgatgaaaactgaaaatggctcaacacttgttgtggatgttaacttaagagggaaacactttgagcgatttagaggcgatggattatgtgtatcaacaccttcgggttcaacggcttataacaaagcgctaggtggcgcactgatacatccttcacttgaagcaatgcaaattacagaaattgcctcgataaataatcgtgtgtttagaacggtaggatcaccacttgtattaccaaagcatcatacatgtttaatatcaccagttaatcatgataccattagaatgacgatagatcatgttagtatcaaacataaaaatgttaattcaatacaataccgtgtagcaaatgaaaaagtgaggtttgcacgttttagaccattcccattctggaaacgtgtgcacgattctttcatatcaagtgatgaagaacgatgaaatttaagtatcatatatcacaacaagaaactgttaaaacttttttagcacgacatgatttttctaagaagacagtgagcgccattaaaaataatggcgctttaattgttaatgatgaaccagtcacagtgcgtaagcaattaatgacaaatgatatattagaaattcatttaccgcgagaaataccgagtgttaatttaataccttatgctcgtaagctagaagtattgtatgaagatgcttttatcatcatagttactaaaccaaacaatcaaaattgtacgccttcgagagaacatcctcatgaaagtttaatcgaacaagtactatatcattgtcaggaacatggtgaaaatattaacccacatattgttacgcgtctagatcgtaatacaactggtattgtgatattcgctaaatatggacatatccatcatttattttctaaagtaaacttgaaaaaaatatatacttgccttgtatatggtaaaacccatacatctggtattattgaagctaatattagacggtcaaaggataggattataactagagaagttgcctcggatggtaaatacgctaaaacatcttatgaagtaataaatcagaatgataaatacagtttatgcaaagttcatttgcatacgggacgtacacatcaaattcgtgtacattttcaacatattgggcatccaattgtgggagattctttgtatgatggttttcatgacaaaattcatggtcaagtactgcaatgtacgcaaatatattttgttcatccaatcaataagaacaatatttatattacaattgattataagcaattacttaaattattcaatcaactctaattcacacagggggtgtaagtatgtcaatgaacacagatgaaaaagagcgtgttcaagaggaattatacgaccaaactttattagatcaatatttagaaaatgatgatattgatcaatttagagatgaatttctagcattacacacatatgaacaaagtgagtattttgaagatactaccgatgaaaatagacaaaagatttttcaatatttatcacctgaagaagttgcaaatttctttgatcaattagatattgatgacgatgaatatgagttgctatttgataagatgaatgcgacatacgcaagtcacatattagaagaaatgtcatacgacaatgcagtagatattttaaatgagttgactaaaccaaaagttgctagtcttttaacattgatgaataaagatgacgcgaatgaaatcaaagcattacttcactatgatgaggatacggccggcggtattatgacgacggagtatttatcacttaaagcgcatacgcctgttaaagaagcattattattggtcaaagcgcaagcaccagacgcagaaacaatatatgttatatttgtcgttgatgatgatggtaaattagtaggtgttttatcgctaagagatttaattgtagctgaaaatgatgcttatattgaagatattatgaatgaacgtgtcattagtgtgaatgtagcagacgaccaagaagatgttgctcaagttatgagagactatgatttcatggctgtacctgttatagattaccaagaacatttgcttggtatcatcacgattgatgatattttagacgttatggatgaagaggctagtgaagactactctcgtttagccggggtatcagatatcgattcgactaatgattcaatcattaaaacagcattaaaacgtttaccatggttgattattttaacatttttaggaatgattactgcgacaattttagggagattcgaaaaaacattagaaaatgtagcgctactcgcagcgtttattcctattattagtggtatgtcaggaaattcaggtacacaatctttagccgtttcagttcgtaacattacgacaggggaaattaatgagcaaagtaaatttagaattgcattaagagaagcaggaagtggtgtattatcgggtgttgtatgttcaacaatattatttacaattattgttgcaatatatcatcagccacttttagcattaatcgttgcaggaagtttaacttgtgcgatgacggtggggacgtttgtaggttcgatgattccattattgatgaataaattaaatatcgatccagcagtggctagtggaccatttattacaacaattaatgatattattagtatgttgatttattttggtttagctacatcatttatggcttacttaatttaaggaggagttatggagtttttatctttagttattgttgttttagcagcgtttttaactccaataattgtcaatcgattaaatattaatttcttgccagttgttgttgcagaaattttgatggggattgtgattggaaattcatttctaaatatagtagaaagggattcaattctaaatattttatcaacgttaggctttatctttttaatgtttttaagtggtttagaaattgattttaaagcttttaaaaaagataaacgcgcacgtcaaggacaaaatgatgatgaatcctcaattccagggcatcttaatctagcgttaactgtatttgcatttattatgattatttcgattcttttagcgtatgtatttaaatggcttggattagtggatgatgtgttattaatggtcattatcatttcaactatttccttaggcgtagttgttccaactttaaaagaaatgaatattatgagaacaactatagggcaatttatcctattagtagcagtacttgcggacttagtaactatgattttattaacggtctatggcgcaatcaatggtcaaggcggcagtacaatatggttaataggtatattagttgttttcacagcaatttcatatattttaggtgttcaatttaaaagaatgtcatttttacaaaaattgatggatggtacgacgcaaatcggtattcgtgcggtatttgcattaataatattattagtagccctagcagagggagttggcgcagaaaatatattaggtgcattcttagcaggtgtcgttgtttcattattaaatccagatgaagaaatggttgaaaagttagactcatttggttatgggttctttattcctattttctttataatggttggtgtagatttaaacataccttcattaattaaagaaccgaaattactaattatcataccgattttaatcgttgcatttatcatttcaaaattaattccagtcatgtttattcgacgttggtttgatatgaaaacaacgattgcatcagcatttttattaacatcaacattatcgctcgtgatagctgcagccaaaatttcagaaagattaaatgctatttcagctgaaacgtcaggtatattaattttaagcgcagtcattacatgtgtattcgttccgattattttcaaaaaactgtttccagttccagatgagtttaaccgtaaaattgaagttagtttaattggtaaaaatcaattaacgattcctatagcgcaaaatttaacatctcagttatatgacgtgacattatattatcgcaaagacttgagtgatcgtcgtcaattgtcagatgatatcacgatgatagaaattgctgattatgaacaagatgttttagaacgactaggtctgtttgaccgagacatagttgtttgtgctacgaatgacgatgatattaaccgaaaagttgctaaattagccaaagcacatcaagttgagcgtgtcatttgcagacttgaaagcacaacggacgatacagagttagttgattcaggtattgaaattttcagtagctacttaagtaataaaatcttattaaaaggtttaattgaaacacctaacatgttgaatttattaagtaatgttgaaacgtcactatatgaaattcaaatgttaaattataaatatgaaaatattcaattacgtaatttcccattcggaggagacatcatcttcgtgcgtattatccgtaataatgagtcgattgttccgcatggagatacacaattgcgatatggagatcgcttaattgttaccggtgctaaagaatacgttgatgaattgaagcaagagttagaattttatttttaacaataatgatattaaaatgcagacgtattttagtacgacgtaaaattaatgattttaaaatgctagtatgtatatgattttgataaataaatgctttttacgtaaatcaagtttgatacagaaaggactaaatcaaacatttatcgttgtaatacgtttaaataactttattaaaaagtcataatagtgttaaaatgtattgacgaataaaaagttagttaaaactgggattagatattctatccgttaaattaattattataaggagttatcttacatgttaaatcttgaaaacaaaacatatgtcatcatgggaatcgctaataagcgtagtattgcttttggtgtcgctaaagttttagatcaattaggtgctaaattagtatttacttaccgtaaagaacgtagccgtaaagagcttgaaaaattattagaacaattaaatcaaccagaagcgcacttatatcaaattgatgttcaaagcgatgaagaggttattaatggttttgagcaaattggtaaagatgttggcaatattgatggtgtatatcattcaatcgcatttgctaatatggaagacttacgcggacgcttttctgaaacttcacgtgaaggcttcttgttagctcaagacattagttcttactcattaacaattgtggctcatgaagctaaaaaattaatgccagaaggtggtagcattgttgcaacaacatatttaggtggcgaattcgcagttcaaaactataatgtgatgggtgttgctaaagcgagcttagaagcaaatgttaaatatttagcattagacttaggtccagataatattcgcgttaatgcaatttcagctagtccaatccgtacattaagtgcaaaaggtgtgggtggtttcaatacaattcttaaagaaatcgaagagcgtgcacctttaaaacgtaatgttgatcaagtagaagtaggtaaaactgcggcttacttattaagtgatttatcaagtggcgttacaggtgaaaatattcatgtagatagcggattccacgcaattaaataatatcattcaacagctttgttcacgttattatatatgtgagcaaagcttttttgcttttataataatcggactgatggaaaattatttgatatttcatttgactgattttttatgcacaaaaaaatcgcctcaaaagctgtagtttcaacttttgatgcgatagtatcttatattcttaaaagacatccacagaattagtccttaacattactgtttgctttatcaataatgcgttggcggtatttgaaaatattactaacaaccgttttaagtacagcatataatggcactgcaatcagaactaatgtaaagccacctaaatctcctgctgctaaaataacaacgataattgttaaaggatggatacttaaagatttacccattacatttggtgtaatgatattaccttcaagttgatgtgcaattaatgtaatgatacaaacccatataaatgtagtaggactatctataataccgagtattgctgcaggtgcaaatgataaccatgaacctaagaaaggaattaagtttgcgacaccagcaaatagtactaataaaggaatatatggtaagtcaataattgaataaccgatatataagaatatacctaaaataacactgacagttacttgaccttgaatgtaagattttaatgtaaagtttaaatcagttaataaatctacgaaaaatactttacgttcacctttgaaaaatttagcaacagctgggataaatttttcatggtcttttaacatataaattaagaagaatggaaccataatcaataagaagatggttgaaattaatgatgtaatgtactgtaatgaattagataaaatattagtaacgccatcacccattgatttaaccatatttgtaattctacttgttacatcttcaggtaatttatccatttgagctagtgcgaatttaataatttgctctgcttctttttgtagggcaggtgtctgactaattaaattgttgatatttgaaatgatgattggtgcaacaaacgcaacaattaagccgataatagcaaacaaagctaacatgattgttgttatactagcccatcttggaaaaccgactttttcaagtaagttttgaaaaggtagacagatataaaataaaaaaccactaattaaaaatggaagaaatacagaaccgatgattgtagctattggagtaaatacttcgtgcacttccataaatagtttgatgagaatgaacagcataatcagagcgatgccagttcggaaccaaaccttgtttaacataaacgatgttcctcctatttttctaaacttagttattatttagtatatcctaaatagcagtgcttaaaaaggttaatattttttaaatatacttaaattaaccattcactttctattttaagatatttactttcaatagtttgtgagacttttcaatgactcgtaagtctgcaattggatcaaacagcaccagtttatatgaataacttattttaatattaaacgtgtttaaatagtgaaatgatcatattaatatttataagaatattctgaaaaatatattgaagtgtctcgtgcttaatcgtataatatttttatgtttaaacaatagggggaatcttatgattgaaaaattagtaacctttttaaatgaggttgtttggagtaagccattagtttatggtttgctaattactggtgtgctatttacattgcgtatgcgattttttcaagttagacattttaaagaaatgattcgattaatgtttcaaggagagaagtctcctaatggtatttcaagttttcaagcgatagccatgtctttagcaggcagggttggtacaggtaatattgtcggtgtatctactgcaatatttataggaggacctggtgcagtattttggatgtggattactgcgtttttaggtgcaagtagtgcttttattgaatctacacttggtcaaatattcaagagagttgaaaataatgaataccgtggtggaccagcgtattatattgaatatggtattggtggtaaatttggtaaaatttacggaattatctttgctattgttacgattatctcagtaggtctattgcttcctggtgtgcaatctaacgctatagcaagttctatgcataatgcgattcatgttccacaatggttaatgggtggtattgttgtagttattttgggattaattatttttggtggtgtacgtattattgccaatgttgcaacagccgttgtaccatttatggcaattatttacatactgatggctgtcattatcatttgtatcaatatacaagaagtgccagcgttatttgcattaattttcaaatcagcatttggattacaatctgcttttggtggtatcgttggcgcaatgatagagattggtgttaaacgtggattatattcaaatgaggctggtcaaggtacaggtccacacgcagcagcggcagcagaagtatcacatccaagtaaacaaggtctagtacaagcattttcagtttatattgatacattatttgtatgtactgcaactgctctgattatacttatttctggtacatataatgtgactgatggtacggttaatgcgaatggcacaccgcatttaattaaagatggcggtatttatgttgaaaatgcaacaggtaaagattattcaggtactgcgatgtatgcacaagccggcattgataaagcgttccatggcagtggttatcaatttgatcctactttctctggcgtaggttcgtactttattgcatttgctttattcttctttgcatttactacaattttgtcgtactactacattacagaaacaaatgttgcttatttaacgcgtaatcaaaataatcaagtttcatcgatatttattaatattgctcgtgtgattattttgttcgctacattttacggtgcagttaaaacagctgatgtagcatgggcattcggtgatttaggtgtaggtctaatggcttggttaaatatcattgcgatttggattttacataagcctgccgtaaatgctttaaaagattatgaaattcaaaagaaacgtttaggcaacggttataatgcagtttatcaacctgatccgaataaattacctaatgctgtcttttggttgaagacgtatccagaacgtttaaaacaagcacgtgccaaaaagtaatctacttttgtttatagtatatgtagtgatcatttgataaaaaagaaaagtattgagaattttaggtgctcagaaatttgaattttaaaaatatagtgtctcttggtacaataacaatacaactactaggggcacttttttatgtcagaatttaaaactggtaagattaataaacatgttttatatagtaatattttaaatagagatgtcacgttaagtatttatttaccagaatcttataatcaacttgttaaatataatgtcattctttgctttgacggattagattttttacgtttcgggagaatacaacgtacatatgaatcgttaatcaaagaagcgcgtattgatgatgcgatcattgttggattccattatgaagacgttgataagcgtagagaggaatttcatccacaaggaagtcgttctcatttaactattcaatcagtcggtaaagaaatattgccatttattgactcgacgttttctacactgaaagtaggtaatgcaaggttattagtaggggatagtttagcgggtagtattgccttattaacggcgttgacctatccaacgatttttagtcgtgtagcaatgttaagtccacattcagatgaaaaagtattagataagctaaatcaatgtgcaaataaagaacaattgacaatttggcatgtcattggtctagatgaaaaagattttactttaccaacaaatggtaagcgtgccgatttcttaacaccgaatagagaattagctgaacaaattaagaaatataatataacttattattacgatgaatttgatggtggtcaccaatggaaagattggaaaccattgctgtcagatatattattgtattttttaagtaaaaacacagatgatcaactttatgaataatttacattagtagatttagtatgaattgtcttcatatagtctggtctataatataatttataaaagattttactgtttaatttaatttaaatttgacgaaattgcaaaagatgtataatgaattatttttaatgtaacggttttcaaagaaatttgatataatagcaataggttaaacaaaggaggaattcagatgattttaggattagcattaattccatcaaagtcatttcaagaagcggtggattcttaccgtaaaagatatgataaacagtattcacgaattaaaccacatgtgacaattaaagcgccatttgaaattaaagatggtgatttagattctgtcattgaacaggttagagctcgtattaatggtataccagcagtagaagttcatgctacaaaagcttctagcttcaaaccaacgaacaatgtgatttactttaaagttgcgaagacggacgacttagaagaattgtttaatcgctttaatggagaagatttctatggagaagctgaacatgtttttgtgccacactttacaatagcacaaggactatctagccaagaattcgaagatatttttggtcaagtagcattagctggggtagaccataaagaaattatcgatgaattaactttgttacgttttgacgatgacgaagataaatggaaagttattgaaacgtttaaattagcttaagtaacataatagtattgttaatcgtagtatgtttgaattaataagaaaatggtcatttttattgaatgtaataaaaatgaccattttctttattttaaaatacgttttaaccttacttagctttttctctatttactataaagtagcttccataaaatacagctaagactaaaaagattaatgccgagaaataaaatgtattgtttaaattgttggtaaattgtgtaattaatccgccaaataatggccctatcattgagccgaatccttggatactattaaaaacaccccaagtttcttcttgttcatctgatttgataaatcgtgccataaaggtattccatgctggtaataagatgccatacattagaccgatagctaaagcgataatccacaagatgtgaatattaacaatcatagatagagtaaaaattaatatcatgtataaaataaatccgcttagaataacaccatacataaagtttctgctgcggttatctattagtttcgataaaaatagcatcgaaactgcacagccgataccaccaataatgattgcaacagtatattcaattgtgcttacgttaataaccttagtagcatatgttggtaatataggaactagggcagcaattgcggcaccttgtaaaagaataccagggaacaacaataaatggcgctttgtcacatcaacaatttgtctcaattgagctttaactggacgagtattataatttgttaactttacatcgacaaaataatataatatccatgcaattaaaacgactaaagacatcatgaaggcaaagcgtgttgggtgcactttgataagtagattcataaaaaccatacctaccaataggcctaacaaccatgaaaaataaacatagcccatttgtttgccacgtttatcttcttcaacactggataacataatgacccaaataggactaactgcaataccgagcatcatagcactaaatatgattacaaaaggtgatgctggaaaccaaataactaaaaataaacttgtaaatgctaaaataaatccagtcgttaaaacgatttttgtgccgaattttttcagtaaaaatcctataacaaagtttgtagatgcatcagcaataaaatgtattgaaaatgctagagacgttattgctacagcaatggatgtaactgttggcaagaaattaatatagcttaggatatacatgcctctcgcaaattccattaaaaataagataataagcattaaaatgaaatttttatgattagcgtaattatttaacgaagaatcttgcatataaaggaacctttccataaatctcttgtggttgtgatgaatgaccgattaaatcaagtaagtctcgacatattgtctgtgtagcatacttaattttatcttgttccattgtactaatcatgttagttaattgctcattaccgttagttaaacttgctacaatttttattgcttcttctggagtatcagcgattttaccaaaacctttttcttcaaagtaaagggcattttcaagctcttgaccaggtgcaggatttaggaaaatcattggaatacaacgggcgaaaccttcagttattgtgataccaccaggtttcgtaatcataagttgacttgatgccatccattcattcatgtgtttggtataacctagaatcaatacattctcgttagatttaaacttagctgttaaagaacgctttagctctttgctcttaccacaaatcataactacttgtgcatttgcacttttcgctaatatatcagtaatcatcgtgtcaaaacctttagatacaccaaatgcaccagctgacattaaaatagtttgcttatctggatctaagttgttgtctattaaccactgcttttgattaataggcgtttcaaatttgttatcaataggaatacctgtcactttaactgttgaaggatcaatacctacgtctatgaagtcttgtttcgtttcttttgttgccacataatatcttgttgaatacggcgtaatccagtttttatgtaagcgatagtctgtcatcactgtagcaactggaatattaatgttaaattgctcagttagtaccgacataactggtgtaggaaacgttaataatattaaatctggcttttcttttatcaataaattaattaacttattaagtccatagtatttgtaaaaacatttgtctagtttatctgggcggctgtaataaaaccctttgtacatatttctaaaatatttaaagctattgatataccattttttacaaatagaagtcaaaattggatgagcttccataaataaatcgtgctcaatgacgcttaaatggtctagattcatatcattaagttgattaacgatactctgtgtaacttgcatatgaccgttaccgaatgagccagtaataatcaatatctttttattttgagtaaccattaatagccaccctccgttagtttgaaaattttatttaagtgtaacttattttacggcattataaaagaaataaagacgcaaagtcgttacatttatagcaattttaatctatagatgaattgatacaaaataaaacgttattttataaagcaatttattgttctatgttttatttgtatatttaaaattatccagtatacaattatagcatatttttggaaacaattatgatattataccatgttacaagatggttttaataatttaagatgagccataattgtaaaactaattcataataccgtatgttttatttttaatagtagaaattagaaaatgctgattagtaggatataacagtgaaattataaatttattaacatcaacaaaacgtgtataataaacatattgtagaaaaaggagcggttcagtttggatgcaagtacgttgtttaagaaagtaaaagtaaagcgtgtattgggttctttagaacaacaaatagatgatatcactactgattcacgtacagcgagagaaggtagcatttttgtcgcttcagttggatatactgtagacagtcataagttctgtcaaaatgtagctgatcaagggtgtaagttggtagtggtcaataaagaacaatcattaccagctaacgtaacacaagtggttgtgccggacacattaagagtagctagtattctagcacacacattatatgattatccgagtcatcagttagtgacatttggtgtaacgggtacaaatggtaaaacttctattgcgacgatgattcatttaattcaaagaaagttacaaaaaaatagtgcatatttaggaactaatggtttccaaattaatgaaacaaagacaaaaggtgcaaatacgacaccagaaacagtttctttaactaagaaaattaaagaagcagttgatgcaggcgctgaatctatgacattagaagtatcaagccatggcttagtattaggacgactgcgaggcgttgaatttgacgttgcaatattttcaaatttaacacaagaccatttagattttcatggcacaatggaagcatacggacacgcgaagtctttattgtttagtcaattaggtgaagatttgtcgaaagaaaagtatgtcgtgttaaacaatgacgattcattttctgagtatttaagaacagtgacgccttatgaagtatttagttatggaattgatgaggaagcccaatttatggctaaaaatattcaagaatctttacaaggtgtcagctttgattttgtaacgccttttggaacttacccagtaaaatcgccttatgttggtaagtttaatatttctaatattatggcggcaatgattgcggtgtggagtaaaggtacatctttagaaacgattattaaagctgttgaaaatttagaacctgttgaagggcgattagaagttttagatccttcgttacctattgatttaattatcgattatgcacatacagctgatggtatgaacaaattaatcgatgcagtacagccttttgtaaagcaaaagttgatatttttagttggtatggcaggcgaacgtgatttaactaaaacgcctgaaatggggcgagttgcctgtcgtgcagattatgtcattttcacaccggataatccggcaaatgatgacccgaaaatgttaacggcagaattagccaaaggtgcaacacatcaaaactatattgaatttgatgatcgtgcagaagggataaaacatgcaattgacatagctgagcctggggatactgtcgttttagcatcaaaaggaagagaaccatatcaaatcatgccagggcatattaaggtgccacatcgagatgatttaattggccttgaagcagcttacaaaaagttcggtggtggccctgttgattaataaaagatttattgatgaaggtaaaactattgatgtttatttattcgaagcattaaataaccagataatcattgctataccagattggttttggtcatatcagatggcaatgacattagatgaagaaacttgttttgaagcaatactcatgcaattgtttgtttttaaagaagaggaagaggcagaatcgattgcatcacaactaacagattggatagaaacatataaaaaggagaaagactaatgaacttaaagcaagaagttgagtctagaaagacttttgcgattatttcacatcccgatgcagggaaaacaacgttaactgaaaaactattgtacttcagtggtgctattcgtgaagcgggtacagttaaagggaagaagactggtaaatttgcgacaagtgactggatgaaagttgaacaagagcgtggtatttctgtaactagttcagtaatgcaatttgattacgatgattataaaatcaatatcttagatacaccaggacatgaagacttttcagaagatacgtatagaacattaatggcagttgacagtgctgtcatggtcatagactgtgcaaaaggtattgaaccacaaacattgaagttatttaaagtttgtaaaatgcgtggtattccaatctttacattcattaataaattagaccgagtaggtaaagaaccatttgaattattagatgaaatcgaagagacattaaatattgaaacataccctatgaattggccaattggtatgggacaaagtttctttggcatcattgatagaaagtctaaaacaattgaaccatttagagatgaagaaaatatattacatttgaatgatgattttgagttggaagaagatcatgcaattacaaatgatagtgattttgaacaagcgattgaagaattaatgttggttgaagaagcgggtgaagcctttgataatgacgcgctgttgagtggagacttaacacctgtatttttcggttcagctttagctaactttggtgtacaaaatttcttaaatgcatatgttgattttgcgccaatgccaaatgcgagacaaacaaaagaagacgttgaagtaagcccgtttgatgattcattttcaggatttatctttaaaattcaagccaacatggaccctaaacaccgtgatagaattgcctttatgcgtgtcgttagtggtgcatttgaacgtggtatggatgttactttgcaacgtactaataaaaagcaaaagatcacacgttcaacgtcatttatggcagacgataaagaaactgtgaatcatgctgtagcaggcgatatcattggactatatgatactggtaattatcaaattggagatactttagttggtggaaaacaaacctacagtttccaagatttaccacaatttacgccagaaatttttatgaaagtttctgctaaaaacgtcatgaaacagaagcatttccataaaggtattgaacaattagtacaagaaggtgcgattcaatactataaaacattacacacaaaccaaattattttaggtgctgttggtcagttacaatttgaagttttcgaacatagaatgaaaaacgaatataatgttgatgttgttatggagccagtaggccgtaaaattgcacgttggattgaaaatgaagaccaaattacagataagatgaacacatcaagatcgattttagtgaaagatagatatgacgatttagtattcttatttgaaaatgaatttgcaacaagatggtttgaagagaaattccctgaaattaaattgtatagtttactttaacagctcaattgtataatcgaatttgttacattaaaaataattgtttcgttgaagaaaaataaattgtatattttaaaagaaaaaggtatactatgatgtatcaaatgaataacctatggcattttgtcagaggggagtaacttaagaatcatgaccgtataaatgattcgacactttatcgtcattacgaagatatcttccggtaaagtgggcaatttaaattgcttagtgagacctttgctatttatttagcataggtctttttgtttgtacttaacttatttatttaaaggagttgtacatgttaatggatccaagtttgatcttaccttatttatgggtacttgtcgttttagtatttttagaaggcttattagcagcagataacgcgattgttatggctgtaatggttaagcacttaccacccgaacaacgtaaaaaagctttgttttacggtttgttaggtgcatttgtatttagatttttagcattattcttaattagtattatcgcgaacttttggtttattcaagctgcaggagcggtttacttaatttatatgtcaatcaaaaatctgtggcagttctttaaacacccagaaattgaaagtcctgaagctggagatgatcatcattatgatgaatctggtgaagagattaaagcaagtaacaaatcattctggggaactgtgttgaaaatagaatttgcagatatcgcatttgccattgattctatgcttgctgctttagctattgctgtaacacttcctaaagttggtattcactttggtggtatggacttaggtcagttcgtagtcatgttcctaggtggaatgattggtgttattctaatgcgttatgcagcaacatggtttgtagagctattaaacaaatatccaggacttgaaggtgcagccttcgcgatcgttggttgggtaggtgttaaattagttgtcatggtattagcgcacccagacatcgctgtattgcctgagcacttcccacatggcgtattatggcaatctattttctggacagtactaattggattagtaattatcggttggttaggttcagttgttaaaaataaaaaatcgcataaataattgatgtgaagcggacaatcttaatttagtttaaggttgtcctttttcatttaattgagtgatttatgaaaaatggattttgaagaatgtgaatcaaaagatgcgatatagtattaagaaaatgtgccttttatatttagcattttttcaatagaaattatatagattttaaagcaaattaggtgttaatgtgtcataatgataagtgattttattgaatggagtggacattagtggatattggtaaaaaacatgtaattcctaaaagtcagtaccgacgtaagcgtcgtgaattcttccacaacgaagacagagaagaaaatttaaatcaacatcaagataaacaaaatatagataatacaacatcaaaaaaagcagataagcaaatacataaagattcaattgataagcacgaacgttttaaaaatagtttatcatcgcatttagaacagagaaaccgtgatgttaatgagaataaagctgaagaaagtaaaagtaatcaggatagtaagtcagcatataacagagatcattatttaacagacgatgtatctaaaaaacaaaattcattagattcagtggaccaagatacagagaaatcaaaatattatgagcaaaattctgaagcgactttatcaactaaatcaaccgataaagtagaatcaactgaaatgagaaagctaagttcagataaaaacaaagttggtcatgaagagcaacatgtactttctaaaccttcagaacatgataaagagactagaattgattctgagtcttcaagaactgattcagacagctcgatgcagacagagaaaataaaaaaagacagttcagatggaaataaaagtagtaatctgaaatctgaagtaatatcagacaaatcaaatacagtaccaaaattgtcggaatctgatgatgaagtaaataatcagaagccattaactttaccggaagaacagaaattgaaaagacagcaaagtcaaaatgagcaaacaaaaacctatacatatggtgatagcgaacaaaatgacaagtctaatcatgaaaatgatttaagtcatcatataccatcgataagtgatgataaagataacgtcatgagagaaaatcatattgttgacgataatcctgataatgatatcaatacaccatcattatcaaaaacagatgacgatcgaaaacttgatgaaaaaattcatgttgaagataaacataaacaaaatgcagactcgtctgaaacggtgggatatcaaagtcagtcaactgcatctcatcgtagcactgaaaaaagaaatatttctattaatgaccatgataaattaaacggtcaaaaaacaaatacaaagacatcggcaaataataatcaaaaaaaggctacatcaaaattgaacaaagggcgcgctacgaataataattatagtgacattttgaaaaagttttggatgatgtattggcctaaattagttattctaatgggtattattattctaattgttattttgaatgccatttttaataatgtgaacaaaaatgatcgcatgaatgataataatgatgcagatgctcaaaaatatacgacaacgatgaaaaatgccaataacacagttaaatcggtcgttacagttgaaaatgaaacatcaaaagattcatcattacctaaagataaagcatctcaagacgaagtgggatcaggtgttgtatataaaaaatctggagatacgttatatattgttacgaatgcacacgttgtcggtgataaagaaaatcaaaaaataactttctcgaataataaaagtgttgttgggaaagtgcttggtaaagataaatggtcagatttagctgttgttaaagcaacttcttcagacagttcagtgaaagagatagctattggagattcaaataatttagtgttaggagagccaatattagtcgtaggtaatccacttggtgtagactttaaaggcactgtgacagaaggtattatttcaggtctgaacagaaatgttcctattgatttcgataaagataataaatatgatatgttgatgaaagctttccaaattgatgcatcagtaaatccaggtaactcgggtggtgctgtcgtcaatagagaaggaaaattaataggtgtagttgcagctaaaattagtatgccaaacgttgaaaatatgtcatttgcaatacctgttaatgaagtacaaaagattgtaaaagatttagaaacaaaaggtaaaattgactatcccgatgtaggtgttaaaatgaagaatattgtcagtctaaatagttttgaaagacaagcagttaaattgccaggaaaagttaagaacggtgttgttgtagatcaagttgacaacaatggtttagcagatcaatctggtctgaaaaaaggtgatgtaattactgaattagatggcaaacttttagaagatgatttacgctttaggcagattatatttagtcataaagatgacttgaaatcaattacagcgaagatttatagagatggtaaagagaaagaaattaatattaaactaaaataatgttgaggtgaacaacgtgtcaatttttagccagtttttaaaaagatcaagccctcaacaaggtattgtattgtactatatcgtcgcaattgtcattgcatttttattattaaacttaccgtatgttcataaaccaggtgtagaagtaaatccaattgacacattatttgttgccgtatccggaattagtgttactggattgtctccgataagtattgtcgatacctattctacatttggacaattaattatcctcgtgatattaaatattggtggaattggcgtcatggcaattggtacgatgttatgggtggtactaggtaaacatattggaattagagaacgtcagttaattatgttagataataacaaaaacacaatgagtggtaccgtcaaattgattattgatattgtaaaatcaatatttgtaatcgaactcgtaggagccatgttattagcattttacttttatcgagataatccagatttaaaatatgcaatcatgcaaggtgtttttgtttctatttctgccactaccaatggtggattagatattacaggtaagtcattaattccttatgcacatgattattttgtacaagcgatagttatatttttaataattttaggatcaatcggcttcccagtattattagaagttaaagcttatattcaaaatagggttactaattttagattttcattatttactaaaattacgacatcaacatatttattcctatttattgttggggtattagccattctattatttgaacataaccatgcgttcaaaggtttaagttggcatcaatcgttattctattcgctgtttcaatcagcgactacaagaagtgcgggtcttcaaacaattgatgtgacaacactaagtgaccccactaatattatcatgggtattttaatgtttataggatcttcgccaagttcggttggtggcggtattcgtacaacaactttcgctattttaattttgtttttaattaactttagtaataatgccgataaaacatccattaaagtttacaatagagaagtacacattatggatattcaacgttcatttgcagtatttacaatggcgacaattttaacatttttaggaatgctaattatatcagctactgaaaatggtaagcttacatttttacaagtattttttgaagtcatgtctgcatttggaacttgtggactatcgcttggtgtcacaagtgatattagtgatatttctaaggtcgtactaatgatactcatgtttataggacgtgttggcttaatatcatttatcattatgatagcaggacgtcgagaaccagataaattccattatccaaaagaacgtattcaaataggataatataatagcaatctaagtttagttaatgtagattttaactggaacttagattgcttttttagtttgtatttttaacttattttataagacgattggtttcgaaaatggtaaactagtaacaatgagaggtgtaacatgatggaaaaaaatgaaaacattaatgtagagattttaactacgtcagatatgcatagtcatttcttaaatggtgattatggttcaaatatttatagagctggtacttatgttaaccaagtaagagcacaaaatcatcgcgtcattttattagatagtggcggaagtttagctggctcgttagcggcctattattatgctattgttgcaccttataaacgacatccaatgataaagttaatgaacagaatgcattatgatgctagcggtgtgagtccaagtgaattcaagtttggtttatcatttttaactcgttcaattgctttggcacgttttccatggttatcagcaaatattgaatacaatgttactaaggagccttatttttcaactccatattgtattaaacattttggtgacttaaaaattgctatcgtaggcgtcacagcagatggtttaatggaaaatgagtattctgaaatggagcaagatgtatctattgaaaagacattagtggcatcaaaacgttggattagatatatccatgaagttgaagagccagattttttgattgtaatttatcatggtggattgaataaaattagtaatagtacgaaaaataaaaaggcaagttcgaatgaagctgaaaaattaatggaagaactcggtgttatagatttaatgattacagctcatcagcatcaaacaatagtaggtcaagatcatgaaacgtattatgttcaggctggtcaagatgccaaagagcttgtacatctttcgattaattttaaaaagagaacaacaacttatgatgttgaaagcattgattctaaagtgattgacttaaatgagtatgaagaggatcaagaattattagatttaacattctatgatagaaaagcagtggcttattggtcacaggaaatcataagtgataaaggtttgatgttatcagtaaatgggttacaagatttagtctgtcaaacacatccattttcgcaattattacatgatgcaattcaccttgcatttgataatgatataacatgtgtccacgtgcctatgaacggagagaaggggttgagtggacagattcgaaatgaagatttgtatcatgcatacccatatccagataagccaatggatatgacaattagtggtcaaaatatcaaagatatattggagtatagttattcacatttagattttgttaacgagcaattaagcttaacaattattgatgaaacgttatgtacaatgtggcaaggattcaattatgagattgatatgaatcaagaacctgggcaacgagtaatgttagatcaaattgatttgactaagagttatagagttacaatgactgactattgttatcgtaactacaagaattatttaaaaaatgctattatacatgaatcatacgatgaaacaatgagtacattaattgcagagaagttaagagatccgaattatcgtatttcatgtagtgataattttatagttaaaaacaggtaaatattgctatgtaataaattaattataagttcaacaagtataaaaacctttcttagagaagattatctaggaaaggtttttagaattttaaaattgatataaaagaacagtgaaattctcattcattatatataagtaaacaaaaaagctaaaatggtatataccattttagcaagtaacggaaacggagggattcgaaccctcgcgccgctttcgcgacctacacccttagcaggggcgcctcttcagccaacttgagtacgtttccaatggctccacaggtaggactcgaacctacgaccgatcggttaacagccgatagctctaccactgagctactgtggattaatttgtatgtgtttgaatatcaagcacaaatattattataacaagattaagttaatttgcaatagataccttaaaaaaatatgcagaacatttacactatatttataaaacattccgcatattttaaaaataaacaatttatttatcttcaaataaagaatagcgtgtcaatgcttcaaacacattcaatgtggctttattataatctattggttggtcgggattttttgatatcatgcgagattgtttatctaccatgtaatagtaaaaaatggaattgttatattgatgccataaactgtggtatgaaacatgaagaatgattgattcattattaataaatgtcactttacatttacgattttttaattctttaatactttcgatataatgcatatttaaccaaatattttcattttgtctgtcagaatgtgttgggaaaaaataagttggaaataatggtgttagtaaaataggtggtttactagaaatgccagtaatgcggtttgtctctgctttcttgccaagataagtattaccataaaatttgcaagagcgttcaatgattttctggactttaaaaggattttgaatacgcgttttgtcaaaccgaattatttcactaccgtttctttgatcgtcatcatcaaatgctggtcgaataaccatgtctcctttgcgtatcacataaatattttgagaatacataagcaaaacctcgctttattaagttttaaaccattaatataaaaatacaattaatgatataaatatattttataataaaattctgagttgtcaagttattattttggtgaaaatgtacaataatttttaactaatagtcagaatattcattgatttcaaaattagaaaaatgtatacttattataaattaaagaaaggtagtggtttctatgaaatacaatactaatgttaaacatacaactttagaagcgtttgtcacaactgtcaatgatttgggtattgaattaattatcaatgaagcacttcgagaggtaagaaaacgacagctcatagaacttatagatgacgcactcgtcaataaagatgaagcagcatttaatcaatatacggcagaatacaaaaatttggaggcatttctcggtgaataacattgattcgaattccataacgcaatcataaaaggactattcttaacatctcatacatgtaagaatagtcctttaatcgtttatgacattaatctaattaattcatgtctatctatgtcaccgaaataatgatataaatcatattctgatagtgcttcttctatgtgctcaaagtcgtgtagacagccaactaatgcattttcaagatcagtgacatctccgacaccaaagaaatcaccgaatatttttgcatgttcgattttacctcgtttaacatcaaacttaatttgtacaaatcctttttcaaatttttcctcgcgttcaaagttatatttagggtttctaccataattccattcccaagttctatatttgtcgttacttaacttttcaatattttcccaatcttcatccgttaatttatattcttctacttcagtttctccaaagatagttttcaagatgatttttttaaattcttcaatttctaaagggtcatttaaaaattcttgaatgtttgctacccgtttacgaacagatttaataccttttgatttaatcttagctggattaacttttagtgcattctgaacttcgtctaaatcactatttaacatcaacgtaccatgactaaacattctatttttaactttaaccatagcattccctgagattttcgcttgtccaacttgaatatcgttacgaccagttaattcagcatttacgcctaaagattgtaatgcttgaacaattggttcagtgaatttttggaaattgtggaaactgttaccatcatcatctgttataaaactaaagtttaaattgccagtatcatgataaacagcgccaccaccagaaattcttcttactacatcgatgttgtgagcatcgatatatgtctgatttacttcctctatcgtattttgattctttccaacaatgatagatggtctatttatgtaaaataaaaagtaactttcttctgctggtaaattttttaaaacatattcttccattgctaagtttaaagttggatctgtaatattattattactaatgaatttcattacaatctctcccttatatctatatatattctctacttatttatgccttaactttgctcaaaatgccaattatatactcacaaatcattctaaatatcggcttaaagttacattttattatttttgattgttaatagtttatttgttaagtgaattttagtacaatataatttagttatgatttaaggaggacttaaaatgactgttgcagaagtgggtaacattgttgagtttatggatggattaagaggtcgtgttgaaaaaatcaacgataactctgttattgttgacttaacaattatggaaaattttaatgaccttgatttaccggaaaaaactgttatcaatcataaacgatataagattgttgaataagaaggtaagttataatgaataaaatctcgaaggctttaacttggtttattataagtttcattatatttcatctcatattatttattatgtggggcgaacaccaagaatactggtatttatatacaggtataatgctaattgctggtatcagttatgtattttatcaaagagatattgaatctaagcggttgcttacatcaattggtgttggtattattacggcaattattttaattatgcttcaacttttattctcacttataacttctaatttaagttatagttcattaattaaagaattagcaagaacaggtgtcaattggaagtggcaaatgttagtaactttactttttgtcattccatgtcacgagttatatatgagaactgttttacaaaaagaattaacacatttttcaataccgaaatgggtagctatattaataactgcaatttgttctagttcattatttatttatttagataattggtggatagtaacatttatatttgttgcacaagtgatattatcattaagttatgagtatactcgacgtatagcaacaacatccgttgcacaaattgtagctattatattgttattaatttttaatgcttaaataagcttttcttagacgtatgtgttctaagaaaagcttttttgcttaagaatagcaatacgaagattcgaggcatgcttcattatagtggtaatattttttaacagcaagcggttattattgagattaggttttagtcagtttttattactaaatattttataaaaatggtataatatttttgagcaagttgaattgatggtggctatctgagtaaaggggggtggtgcctatggcattacttaacacttttgaaaggaaaagcctattgtgatatctattgcaaacgcattacatttaatgttaagtttcggtatgtttatcgtcactttcattggtatagtagtagcaataataaatttaagcaataaaaaataaccatcatttcaaaactttgacatagaatgatggttaaagaaaatctcatttagtcaccgtctttttaacgggctcattaggcgacatgttcctgcatgtcgtctttttacatttttatagtaacatatcttttatttaattgtctatttttattagatgtgtaacaaaattttgaagtattttccgtatattgcctgctaaacatgtcagatttgaaaggaaaatcatactgtggtagaaatcaattatgattatatggtagtacttataaataagtgatttctattgaatatgtaatgaagttcatatattaatataactttcattgatatagaagtcgcaatgattaatttaaacaataaaaaacaaccatcatttccaaactttgacaacgaatgatggttaaagaaaatctcatttagtcaccgtctttttaacgggctcaataggcgacatgttcctgcatatcgtctatttatacactgcacaatttaataataatacaattatactttgatgtccatttaacataaagtggttgaaatttgcagcaaataaattaaccttgactattttcagaaaattctgtataaataacgaaaaagagatatggattaaatatgaagaggtgtttttatagaagaataaaatttttggcactatattatatttaactttagcacttggattatcaacagcagcttatgcatctacagaatacgcagaaggaggcacttggagtcatggtgtcggcagtaagtatgtttggtcgtattattatcatggtcataaaggacatggtgcaacagctattggaaaatatagatcatttagtggttatacaagagctggtgtaaaagcaaaagcatcagctactaaacataattggtgggtcaatagagcgtattataacatttattaaatactaaaaaatcatagaaaataaacaacgcaagaggtacaacatgaaatggttcaaattaatacttgatgttacaatcttcattctgattgctatattgttatttgtttatacatataaagaaaacgaagaaatattgcctgatactaaataccctatagcggtaactgactggaataaaaaatatagtaaaaatgagatttataaacgtatagatcaattcgctaaaaatgagaacgtagcaatctataaatcaacttcaaattatacaaacaaaaacgtagataaagatatatatgtatttaataaatcaaaagcagcaactatcactccttttaatgctaaatataacattcattatttaagtgacgacgaagtattaaaaaaagatatcaaagggagttattttgtaaaagacaaaaattttgacgtgtctaaattcataaattttttaaaagaatatggtgttactgctgaatcatacaaaatagatcatatgatgattgccgttggtgtcattaaacaaatgaatatagtagttccattatcctcacttttaatcgtttattttatttattatattttcgaaaagaacattaatttcaaagcgtatgcgattaagtatttaaatggttttacattaagaaaaataattttcgaaaatttttcaaagaaatgcacgtattgggtaacgttaatcataactcaaattcttttaactacaagtgtactttggatattaaattacacgggtaatttagatttattcatattaagaatagttctgctttcatgtcttttcattttaacgattagtgttattaatttatggactttcttaatgttactaaatttaaatattgcaaatatgattaaaggtaagcagcactttaaaacaattcgttttattaatacagtttgtaaaagtattctcttagtactaatagctaatgtaatgatagaaaatactagtgttattaaagatttgaataaaataaaagaaactgagaaatattggaatgtattagatgattattacacgattgaatttgcaccttatcacgaaacaaaacaaagtttgattgataatatggtgcgatcagaacaattagtaaaggctagtgaagcagaaaataatgcgattttattcaaaccaaagggtgactccgttgacaatgacaacttttcgcctgatgaggggaatgtaatattagtaaataatcagttctggtcgatttattacaagcagtttcaacctgatattccgataaaaaatcaaaaaaataatgtcgaagtaattattccacaaaagtttcatgcaatgcgtaatgaaatcaatcaagcatatcattcatggtttgaatttgtacaaaataaaaataataaagagaataagttatctatacagtttatcaacaaaaatgattgtcgaattttttcatttgatgcacgagatagtcgccatttgtcatttatagaggcgccaatcattgtgaatgttcaggcatcagatttatcgaatgatttttattatgccatgatcagtcaaggcgggtatttattcaaaaattatgacgcgctagtaaaaaatattgaaaagtatcatcttgatggggaaatcagtggaataaccaattataaagatagcgtgatggaaatgtatcatgaaaacaatttgaaattaacagtactcaacttttcacaaatcattatcgcaatcattttaataattattattttatttgatgtgaaatattattttgaacagcatcgaaaattactcgtaatcaaaaagctatatggttattcaacattaagagccaattaccaatacttattaataaataatatagttgttatttttattggaatattgacgaatgtaattttacattctcactatataatgatgttatttgcaacgattcttgtcgttcaaatattattgcagatttgcagcctatactatcatggccgacgttttaatgaagttatcaaggagttttaactatgaaatttatcattgcaatattattaggattaatattatccattactattgcttttacaatcatacatcatcctatacttgatcgttttaatcctttcttaaaaacggagtatagttatgccaaagtgccaaaaggtacgcaacaatatgttaatattacggcttatagtgaaagaggggaaaagcttgattataaattaacatttaatggattttcacctagtagaacgtatgtcgaaataaagcataaagggcaatatgtcatatcgatcacatatgttgaaaaagaggatacaccaaaagaggtaagacaagaatgatagaattaaaagatttaaccatacaaaaaggtaatacacatattttgaagaaacttaatttgaaatttcaatgtggaaaatcatatgcacttattggtaaaagtggatgcggtaaatctacattattaaatactattgctggacttgaaaaaacaggaaaacaatatgtctattttaatggtcaattagaacaatttaaatctaatttttacagagataaattaggatatttatttcaaaattatggattaatcgataatttgacagtaaatgaaaatttagatattggattagcatataaaaaaataagtaagaaagaaaaagaacaaataaagatacgttatatagaacagtttggtctgtcaaacagtttaaaaagaaaagttcatacgctaagtggaggtgaacaacaacgtgtcgctttaattagaatgatgttaaaagatccgattgttatgttagctgatgaaccaacgggtgcgttagatcctaaaacaggacagatgattattcaatcattatttggtttggtcgatgaaaataaagtgctgattttagcaacacatgatatggctattgcaaatcaatgtgacgaaataatagatttagaacagtatagaaaagtagcatctatgtgatatccaaaagataaaattaaaagccaatcaatgggaaatgttgacttcaacactccgtttgattggcttttatactgtgttactaagttatgaaagtaacaacggcaaactgaaaaaaagcaatataataatatttaatacgattagtaataaatgtaattgatttttcgttttaatatagcaaaaaacaatgactaaagataacaacaatatcatgattgcacctgggaagaaccataatgctgaagctgtgtaccaaatcattggtaacgccataataataaaagatataagacaagaaaggataccaataatattataagttctagtcaaaattacacctccaattttcactttaaaatgacatgcgtaaaacaatcattttaaatacattatacaataaaattaaattgtgcggtagaagaatttgaaattaaattgaattgtttttggtagttggtatatttataacactctgcaaaagaatgtagcaaaattagataaattagattatttaaaattatgcgtgatattattatttttatcatgcaaataattataataacaatatttaattattgtatttacagttgattaatagcgttgtgaagtataaaattattttgtaaaacaattttgttattaagaggtgcgctatggaaaaggggattttcaattacgataatgcgaatgtattaaaattagatactaatcagttaaatgaaaacataaaagtcattgacgatatatttaaaaattatgagcagatagagccaactatagaagtcgaaaatggaaatacaaaattaaaattaaatggatattttattgcgtcaattataagcccattaaatttaaataaacttaataatttatatgttgaagaagaattttatcatacatataacgaattaattgttaaatatactgaggtaaaggaataattataatgaaaaaaatatttatgatggtacatgagttagatgtgaataaaggtggtatgacctcttcgatgttcaatagaagtaaagagttttatgatgcggacatacctgctgatattgttactttcgattacaaaggaaactatgatgaaattattaaagctttgaaaaaacaaggtaaaatggatcgaagaacgaaaatgtataatgtatttgagtattttaaacaaatttcaaataataaacattttaagtctaataaattgttatataaacatatttcagaaagactaaaaaatacgattgaaattgaagagagtaaaggtatttcaagatattttgatataacgactggtacatatattgcctacattagaaaaagtaaatctgaaaaagtgattgatttctttaaagataataaacgaattgaacggtttagttttatagataataaagtgcatatgaaggaaacatttaatgtagataataaagtttgttatcaagtattttatgatgaaaagggatacccatatatttcaaggaatattaatgctaataatggtgctgtaggtaaaacttatgtgttagttaataaaaaagaatttaaaaacaatttagcactgtgtgtttactatttagaaaaactaataaaagattctaaagatagtattatgatttgtgatggaccagggagttttcccaaaaatgtttaatacaaatcataaaaatgctcagaaatatggcgttattcatgttaatcatcatgaaaatttcgatgatacgggtgcatttaaaaaaagtgagaaatatattattgagaatgcgaataaaattaacggtgtaattgtattaacagaggcacaaagattagatattcttaatcaatttgatgtagaaaatattttcactattagcaattttgttaagatacataatgctccaaaacattttcaaactgaaaaaatcgtaggtcatatttctagaatggtaccaacgaagcgaattgatttgcttattgaagtggctgagttagtcgtaaaaaaagataatgctgttaaatttcatatatatggagaaggatctgtcaaagataaaatagctaaaatgattgaagataaaaatttagaaagaaatgtttttcttaaaggatatacaacaactccacaaaaatgcttggaagattttaaattagtcgtttctacatctcaatatgaaggtcaagggttaagtatgatagaagcaatgatttctaaaaggcctgttgttgcctttgacatcaaatacggaccaagtgattttatagaagataataaaaatggttatttaatagaaaaccataatattaacgacatggctgataaaatacttcagcttgttaataatgatgtattagcagcggagtttggttcgaaagcgagagaaaacattatagaaaaatattcaacggaatcaatattagaaaaatggttaaatcttttcaatagctaaatgaaaaaatcctaggtattcatgagtacctaggatttttacgcatgataaatacaaaaaaagagaggatagtcctctcaaacaatagttaataaaattgtagccatttcttccagctgtaactactaatacaagctaagttcattacgatatgtatgatttcaaattcataaccacttacatatcctcttgtaagtttaagtgtgaagattgagcctaacataacacaaatataaaaaacattaacataaggcgttaaaaagccgataataagtgctaaacctccaacaacttcaccaattgacatcaatactgcgatggtaggtggtaaacctaaagagcctaagaagtgaattgttccatctaaatcaacaaatttcaaagtaccatgcactaagaatgatgttgctaacatccatctaattaaaagcatacctaatttcatcatgtcacctccaacattcatatttttaaaacatagtccaaattatatttgtaaacatgtggaaagtaaagattttttataagattaattattaaatatttattaaatattctattgtattgaacaattgttgtagaaagatgtttaagtcatcagttactttttgtatttataaataaagattagtacagcatagtgcaaagattatagggaaatgaattaactattgcatcgctatttatgaatcgtaaacactattatgaaattgcgagagtagtatggacaattagaatgatggtttgagataaatgagtgttattaaccagtgcgtcattttcaaaattagatgccatttgctgtttataataagaagatttgataattaactatgataagaaaaaataataatcccctaaatacattataaacaaattaaatgataaaataataatatatatttctactaaagttgtttggaggtaaatgtgtgaataggaatatcgttaaactagttgtgttcatgctaattttagttgtagcagtagcgggttgtggtcaaaaagatactgaagagaaaactgaaatgacgacaataaaagatgaattaggaactgaaaaaattaagaaaaatcctaaacgtgttgttgtattagaatatagttttgctgattatttagcagcattagatatgaaacctgttggtattgcagatgatggcagcactaaaaatataacaaagtcagtaagagataagattggggcatatgaatcggttggatctagaccgcaaccgaatatggaagtgataagtaaattaaaaccggatttgatcattgcagatgttagcagacataagaaaatcaaatcagaattgagcaaaattgctccgacaatcatgttagttagcggtacgggagattataatgcaaatattgaagcatttaaaacagtcgctaaagcagtaggcaaagagaaagaaggcgagaagcgtctggaaaagcatgataaaatattagcggagattagaaagaaaattgaacagagtacgttaaaatctgcatttgcattcggtatctcaagagcaggtatgtttattaataatgaagatacatttatgggacaattcttaattaaaatgggtattcaacctgaagtcacaaaagacaaaactacgcatgttggtgaacgcaagggtggtccttatatatatttaaataatgaagaacttgccaatatcaatccaaaagttatgattttagccactgacggaaaaacggacaaaaatagaacgaaattcattgatcctgcagtttggaaatcattaaaagctgtgaaagataacaaagtttatgacgttgaccgaaataagtggttgaaatcaagggggattatcgcaagtgaaagtatggcagaagatttagaaaaaattgcagaaaaagcaaaataaaaatacagcgctactcgtaaatcatataagagtggcgctgtatttttaattatgtttattatctgtcggatgtgatgatttacctgaaagtttatttcgaataaatttaattacataaccgacaaggattgttttaacagttcttttaatgaattggcgcatcgttacatacctcatttctctatatcttacgaactatatacccattcatatatgctttttaaacgtcattgtcacaatttaatttttagggaatataatataaccatctttatctgcttttttagtaaaaatgacaaaaattgcatgtattattgagatgatggtagggatacctgtccagaaaaataataagtgaaaaagaccttgtccaaatttatcagcataaaatttatgaatacctaaacctccaagaaataatgcaacaataacataaatggctttattgactttcatttgtaaatcctccttaactataattctacttaaattcgttgtgaaaaccaatatttctaactttagaattttcaaactttctaaaattataagtatatctttttaaaataagctagaatttctatataataaatgttaataacgtaaaagggaatgatgacatagtgatacgtcaagcacgtccagaggaccgatttgatattgcgaagttagtttatatggtttgggatgatatggaattagaattggtaaagcatctacctaaagacatggtattagatgcaattgaaaaaagctgtgttgatgcaacatatcgaactttttatcagcatattttagtttatgaagtagaaaataaagtagcaggttgtattattagctatagtggtgaaaatgaattgaaatacgaaaaagcatgggaactacttgacttgccagaaaaaataaaacaatatggcacgccattacctgtaaaagaagctaaagacgatgagtattatatagaaacaattgcgacatttgcagcatatagaggtagaggcatcgcgacaaagttattaacgtcattacttgaatcaaatacacatgttaaatggagtttgaattgcgatattaataatgaagcagcattaaagttatataaaaaagtaggctttatatctgatggacagattgaattatacaagcacatgtatcatcatttaattgttaaataaaatactcgacagttcgatgtaagtcgattgccgagtagtatcattttctattaaatgcctgcaaataatgcactaatataaatacctaatgcatataataaaccgaaaaatgtatttgttttaccagcagcagccattgctggcatcattgtaggcggtgtatcattcttcttgaaacgtctgataactttaacaggcattgggaatgataacaacgcaagtaagtaaaataatgagccaccaggtttaataatgatcgtaagtacaataaaggcataagcgataaagtacatgattgccataaatgttaaagaagcatttttacctaatagaatgggtaaagttttgcgaccacttgctttatctttgacacggtcgcgaatattgttagccatattaattaaaccgatagtgattactataggtacacttaaccaaattacataactttgaatattgccagtttgaataaagaatgcaataacgataataaacatacccataaatacgcctgagaataattcaccgaaaggcgtccatgaaatagggaaagggccacctgtatataggtaaccaacagccatacatactaatccaactggtaataaccaaaatgaagagttagcagctaaaaacaaacctaatattgctgctaagatgtaaaatgcaatggctaatcgtagcacaagctctgggctcataccgttgcgaacaatggcaccaccaatgcctacagattcatgatcatcgaggccttttttataatcatagtattcattaaacatattagttgctgcttgaataagtaagcatgctagtaacatggcaatgaataggctgattttaatatgatcttcgctaccaagaaaatatattttagatgctgctgtaccaactaaaacgggtactacggaagcagttaatgtatgaggacgcattaaatgccaatatttcttaactgtagaatattgctgatattgattactcattgaatacaaaacctctttaaatcatattttttataacaaagatattttaatagaaagtagcataaaggtcaattgacgtgaaaaattgcaagataagtttaagcaattcttgtaacacaattatccaaaaatgatacaatataataatgagtgaaaaaagacgaagaaagaagtgaaatggatggctacgggcgtattagaggacgatattgtcaaagagatatatggcagctcaaaggaatgggtttcagttgaagtgaaattatcacagtcactagacccgagcacattatttcatctcactgacaatgaggcaggagatcgcttttatatgcgtttgaatgataatcgaacgtcatattttggctacaaagcaattcaattattcaaaaataattctaaaaataaacaatctatttttaaagactgggaaaaattaaaacataacatcacatttatacatccgcaatctgagaaacatcatcttcgagttgttggagggttccaattttcaagtcataaatcagatgatgaatggcgagagtttggactaaatcattttgtattacctgaagttttaatttcaactgataataatgggacatttttaacttatacagttaaaagggaaagttttactgttgaggcattgaacgatttaatggatttgttcaacaatatatcggacatagatgtggacgagcaaattggggaaattactagaaatgaagatatttataaagatgactggcgtcaacttgtagtagaagctatagaatctattaataatgaagaaaaaattgtactagcacgtagacggttaataaagttcgataaagatatcagtattccatatattctaaagcaagcatattctaaagaaaaaaacagttatatattcttgttagaatcacaagattctatattcttttcacaaacacctgaacaattaataaaggtcaataataaaatactatcgactaaagctgtagcaggtacaattaaacgttcacaagatgaggacgaagatacaaaaaatgttgaagcatttttaaaagataataaaaacttaatcgaacatcgatttgttgttgacagtattttacatgatattaaaccttatatcactgaattacattatgataagacgcctaaaattctaaaaaatgatcatttatatcacttgtacactgaaataaaggcgccactgaaggatgattcgtatattagtttaattgataatttacatccaacacctgctttaggtggctatccaaaagaatttgcaatggattttattgagcagaaagaatttggtacgcgaggattatatggtgcaccggttggctatatagatatatacgatgattgtgaatttattgttgcaattcgttcgatgcttattaagaaagcacaagcaactttatttgctgggtgtggcattgttaaagattctgatccagatagtgaattggcagaaacgaaccttaagttcacacctatgatgaatgcattaggagtcgatatgaatgggaaatcataaagcagctttaacgaagcaagtttttacatttgcatctgagttatatgcgtacggcgtaagggaagtagttatcagtccgggatcacgctcaacgccacttgcacttgcatttgaagcacatccaaatattaaaacatggatacaccccgatgagcgaagtgcagcgttttttgcagttgggttaattaaaggcagtgaaagacctgtcgctatattatgtacgtcaggtacagcagcagcgaattatacgcctgcaattgctgaaagccaaattagtagaattcctttaatcgttttaacaagtgaccgtccgcatgaattaagaagtgtaggcgcaccacaagcgattaatcaagtaaatatgtttaataattatgtaagttatgagttcgatatgcctattgcggatgatagtaaagagaccattgatgcaatttactatcaaatgcaaattgctagtcaatatttatatggaccacataaagggccaattcattttaacttgccatttagagatccgttaacacctgatttgaatgcaacagaattgttaacttctgagatgaagattttaccgcactatcaaaaaagtatagatgcatcggcattaagacacattttaaataagaaaaaaggtttaattattgtaggggatatgcagcaccaagaagttgatcaaatactaacgtattcaacgatatatgatttgcctattttagctgatcctttaagtcatttaagaaaatttgatcatccgaatgttatctgtacatatgatttgctgtttagaagcggcttagacttaaatgtggatttcgtaattcgtgttgggaaaccagtgatttctaaaaagttaaatcaatggttaaagaaaactgatgcatttcaaatattagtgcaaaacaatgataagattgatgtctttccgatagcgccagatatttcatatgagatttctgcgaatgatttctttaggtcattaatggaagacacgacagttaatcgcgtaagttggttagaaaaatggcaatgcttagagaaaaaagggcgtaaagaaattaaatgttatttggaacaagctacagatgagagtgcattcgttggtgaattgattaagaaaacatctgaaaaagatgcattatttattagtaatagtatgcctatcagagatgtagataacttgttattgaataaaaatatagatgtctatgcgaatcgtggtgcgaatggtattgatggtatcgtttcaactgcactgggtatggctgtgcataaacgaataacattattgataggtgatttatcattttatcatgatatgaatggactattaatgtcaaaattaaataatattcagatgaatattgtattattgaacaacgatggtggcggtattttttcatatttaccacaaaaagaaagtgcaactgactattttgaacggttgtttggcacaccgacgggattggatttcgagtatacagctaagttatatcaattcgattttaaacgttttaacagtgtttcagaatttaaaaatgccacattgttatctgaaacttcgacgatttatgaattgataacgaatcgcgaagataactttaaacagcatcaaattttataccagaaattgagtgaaatgattcatgacacattataaattttatgaagcaaacgttgagaccaatcaagttttagtatttctgcatggatttcttagcgacagccgtacttatcataatcacatcgaaaaatttactgataactatcatgtcatcactatagacttaccaggccatggcgaagatcagtcttcaatggatgaaacgtggaattttgattatattacgacgttgttagaccgaattttagataaatataaagataaatcaataacattgtttggatattcaatgggtgggcgtgttgcattatattatgcaattaatggtcacatccctatatctaatttgatattagaaagtacgtcaccaggtattaaagaagaagcaaatcaattggaacgccgtcttgttgatgatgcacgtgctaaagtattagacatagcaggtattgaattatttgttaatgattgggaaaagttgccattatttcaatcgcaactagaattaccagttgaaatacaacatcaaataagacaacaacgattgtctcaatcgccacataaaatggccaaagcattaagagattatggtacaggtcaaatgccaaacttatggccgcgcctgaaagaaattaaagtaccaacattaatattagctggagaatatgatgaaaaatttgtacagattgcgaaaaaaatggcaaatttaattcctaatagtaaatgtaaattaatttctgctacaggtcatacaattcatgtggaagatagtgatgaatttgatacaatgatattaggatttttaaaggaggagcaaaatgactaacagacaatgggaaacacttagagaatatgatgaaatcaaatatgaattttacgaagggattgctaaggtaacaataaatcgccctgaagtacgcaatgcgtttacacctaaaacagttgctgaaatgattgacgcattttcacgtgcacgtgatgatcaaaacgtttcagttatcgtattaactggtgaaggtgatttagcattctgttctggtggtgaccagaagaaacgtggacatggtggttatgtaggtgaagaccaaatccctcgcttaaatgtattagatttacagcgtttaattcgtattattccaaaaccggttatcgcgatggtaaaaggttatgctgtaggtggcggtaatgtactaaatgttgtttgtgacttaacgattgctgctgataatgctatttttggacaaactggtcctaaagtaggttcatttgatgcgggttatggttcaggatatttagcacgtatcgttggacataagaaagcacgtgaaatttggtacttatgtcgtcaatacaatgcacaagaagctttagatatgggtctagtaaatacagtggtacctttagagaaagttgaagatgaaactgtgcaatggtgtaaagagattatgaaacactcaccaacagcgttacgattccttaaagcagctatgaatgctgacacagatggtttagctggtttacaacaaatggctggggatgcaacattgctttattacacaactgatgaagcgaaagaaggccgtgatgcgtttaaagaaaaacgtgatcctgacttcgatcaattccctaaattcccataagttattttgaatatgatattaagtcacttgcgtcgtttattagcgacgataggtggcttttttattttataagaatttaaaagggcattttaattaattatcataaagataagatagtttgagaaaaattaatagagaaagaataaatgttaaagattattattacaatgaaaaaacgagctggtgagaaattgaattctcgccaacccgctttatgaagtgaaatcatttaaattagttatactaagcgctcataaacgattggtcgcgaagtgccaataccttgtttggatgacgtttgcatgaggatatgctgtgtatcatcataatcaagaatataaatgatttcttcattatcaatagatgaaaatttaatgcgttgatgtgccgtatctataaaaagaatatgatattgattgtgacttgtatcatcgccatgacgtatacaaattgatttttgtaattgatgattactccaattaccaatgaataaattgatattggtttgttctagatgtgtgagtttggttgtgtcgtaaactaaatttataaattgtagttgatacatagttttacctgcctttaatcaatatctatattactttttagtaacctatcattgaaccataccagttataatcacgattgaatgataaatgtaataggcttgaatctgcatcttggattgataattctgtatcccaaggattccagtaaataagtttttcttggtcattaattttagcattaccaacaactgctagcgcatgtcctaaatgtgggtcattagggttttgagatacactttgtgcaaggatcataattcctacattatcttttgtaagttgatcaacttgttcatatgatggtacgccttcttgataatgaatatctctgccttgtgatttaccgtattcaatcatttgattagggaatgttgcacaattaggaaggtcttgctcacttacttcagggtataatgtacgcataatatcatgtgcattataagtgtctgtatttttagttgcatttaataatgctgccatactgaatcctgcacaccatgagttatcgaattgttgttctctaattttgaagttttttaatgtattttcatattgaacttgatcttcttgtatcgcttcgttttcttcaactttagtaggtgttactgtattttttaactcttgtttcaattttgctgaaactgttttagcactttctttttcttttacattaccaggtagaggcgtagcttttactaatctaactttgccatcttcttcaaaataaaaccctttttcatcagtaagaacagtgatatttgaatttttatctttaatttggtctaaatctttagcgatgaagtttgaaattttaacactgtaattcatgtcttcttttgatttgtttaaatcatctttatttttaggactaagtgttaaagtataaacaattttaccgtcttttataactggataatagtaactattatcttcttcaccattaaatttataaattttaaaagcttcgccaagttcatatttaccagtttttgcattactttgtttatctaatgctttagcataaccagcaaattgttgttgtgctagatcttttactttttgaggtactttgtcactcttaacattaatttctagctgtttagagtgtgaatcggctttggctttattgttattagcaaatgcgcctagtgataaaataagcattgaaaccattatgatgcttataatattgaatactctagatttacatgaactattcatataataccctccatttaaatcaaaatattttacgttgctaagactttgcttctattttatctagacgaacttaattgttaattaagctgcatctggattgtctgaattattgttatcgccattgtctggattatcagggttgttagggttgtcagggttatttggttcatctgggttgttagggttatcaggattgttagggttatcaggattatctgggttattaggttggtcatcgttggcaaaatggatatcttcaatattttgttttaagaagttgcgtacattttcattaataaataccgcaccattaaattcatttggtacaccgccccaatgaattccgatcacttcatttttttcattaaatacaggtgaacctgaattaccaccagttgtacttaaatcatattgcatagcttcgcctttgaggtaagtgatttttcctttactttcccacattgttgctacaggtttatcaccaggatatcctgttacagtaatattttggttaacttgtgtttcagcattattactcattgttgctggtttaactacttcaccaatatgtttgttttgctcattaggggagaatttaactattgctaaatcaccttcgcctgaatatttagtgatttgttcagcagtgaaaccaccatttggataattgtcttggttaattgcagaagggaatgcttttaaagcatgaggatcaccgtgcgtagcatctacgacgtgtttatttgttaaaagagtatctttacctacaactacaccggaagcaataaatgtaccagtaggtgcttcaacttgaatataagttacgggtgcataatgaccattcgttgtatctgtgatttggtgacgatcgttatttggtaatataacatttgcgtgttcacgttgttctaatggtttaaggttaccgcctttttgaatcttaggtgtttgctgtttgcttgactgcgtttgttgtggatgattgtccatagcctttgaagataacgcgtttgctgctggagaactcacaagtgtcgctgttgtcaaagttgcaacgaataaagaactaacttttaaaaatttacctttcatctaaaaacctccaaaaaatttatttacaagttaaatataacactaaaaatttttaagtcaataagaatatataaataaattaaaaagtttttgtaaagattagagtttacaaaaacattaagggaattaaaattgaattgtattatactttattcaattgagttaaattgataagatcgtcaattgtttgcatttatctaaaagaataaataagaaaggaattgagagcgaatggaaagtatttgtttataataataaatagtaacttttgaataataattgtttggccaaaggtagattaatatgaatggtgatatattatttgagtgcttaagtttcgaagaacaattataagttagcatattaaaaccttttgatagaatcattttgagtgaggtgtttaaaggagaggaatataactcggtagtatttacagtctctatagagtattatttaaaacttatagaatataaaaaactgaacgtactatgaatttagttcacgacgtccagttcaacatatcatttttatttagtatttaaatatttagcaagtctcttcataccttcttttaaaacatccatttcataagcataggaaatccttacaaatcctttaccgaattctgtaaaggatgagcctggaacgattgctaaatgtgttgattcaagtaaatcgacacaaaattcgaaatcgtcatcggtgatatgtttaatacttgggaaaatataaaacgcgccttcaggttgagcggtaatctcaaaacctaatttagttaattcagatactaaataatttcttcgttctacataagcttcgttcatatatttaggagcttctaatccttcgttaagtgctgttatacatgctatttgagctggaacattggcaaaaatacaattataggcgtgcataaatgttaatttatcaatcaaatattgaggtcctaatagaaaaccaattcttattccggttgctgagtgtgatttacttaaaccaccaattaatattaattgatcacgaatgtcttcaaattcagcgaaggatacatgtttaccactaaatgtattttcagcataaatctcatcgctaataataaataacggatatttttttaatacatttacgatatttaaaacttcatttctttttaaaactacgccagttggattagtcggataatttaacaagacagcttttgtctttggagaaatatgactttctaatgcatcaggtgtaattttaaattgtgttgctgttgtatcaatataaattggtttaccacctagtacttcgatgagtggtatgtagcctgcataaattggtcccggtattataatttcatctccaggctctatgatagaacgtaacgttgtgtctattgcttcacttgctccatttgtcacaataatttcttcaggatcataggaaaaatgataacgatttttgaagtattgactaattgcttcgcgagtttctaataaccctttattgtgagagtatgatgtcttgtcattgttaatagcatcaatatatgcctttttcacaacatcaggcatcgggaagtctggttggccaatagttaaattaacacaatcatccaaattattcatacgatttgaaaattggcgaatacttggtgctcttaaatatttagaattagaatttaaagaaagtttcatttgtgacacctcaaatataaatcaaatattgtctaaaaatttagaaattaataatatcataacatacttttaaagcaaaaaagggtaaattacttaagctttatttgaaaaacgaaaaatgtctaaatacactgtagtaactacttttcaaaatgaataaagtggttacagttaatgtacttagacagtataaaattatgaatctttaaactgtgatggtctttgtaaattaattattggatttgtccatttacaaacaaagtttgtagataatacatatacgatgattacagatatacttattaaataaagataagtcattaatgatataggattatcgaatgggtaccattcaaatcctctaacaatgccaataattaaaccatgtaataaatatacgtatagcgtacgactaccaatataagtatataattttttctttgttgacattaaatttagaaacgcagtcattgcgattaatataattccatataatataagtcgtttaaaaggactgaatatactctgtccttcattttcaagtgaagtatatggtgaacttcccaataaccaatctgcattgataggatgaatcacgtaaacgataaaaaacaaaataaaggtaatgatagatactggtattagttttttatttttaaaaatagccgtatgttttttggtgaaaatgtaacctagataaaatattgggaaaaatacgattgtccttgaaatgcttaagtagctatcgatgttatctgaaaaacctgctccaatagatataataattgaaactgatagcactttatatggattaaatcttctaactattactaaaatgacatgaaagaaaaatagcgtgatcaaaaaccataacgcaaatactgggttaaaaggatcaagttgtaattcgtcacttttacctgttaagaaataataaattgaaaagaatgcaaaaaatatcatataaggtactatcaaacgttttgaaattttttctaaatagtatggtttatcaatatttttcgcgaaataaccagatataaacaaaaatgttggcatatggaaactataaataactaggtataatgctgataaatatttatcgccactagtgtagggttgtaacatatgtccaaatacgactaataatattaaaattgctcttgcgttgtcaaaaaaataatctctctcttttaatgaagtcatattttatctcctttatgtccataagactcttactaatttattatattttgtattagttatgcaacaaatttgtctattgtgtcgaatagtattgtaaaaattataaaaaaagcatataatattataaataatatgtagtggagtagaacaacatgtataaacaacttgaaaaacttattacactgactaacaatgacttaaacttagtgaatagaagatttggacaacgcacggatatcacatctgaacagctagaacttctccgtattttatttaattacgatcgcttatcacagtatgatttgacgatgaagattagcagggaacaatctatagtttcaaggtggattaagaaattagttttgaaagggtacatcacaagtcaacaatctagcgaagatttaagatgtaaagaattaattttgactgatcaagcacgtacattaatttcacaaataaataatgcacgttgcgaattgattgaagcaagatgtcaatgtttatcggaagtcgaattagacaatttaaatcaattacttgataagttaaatcaacgacgcatatcgttgtaacacgacaatagcaaacacataatttagtgtcgttgtgcacacaacaaaaattgaatcatgaattacaagcaaaagtagcggtgattgttaaaattgatggtaaacaatcaccgctatttttgcttgtgtatgtataaaaaagggatcaaaggtcatcccccatgattgatagtgggggatgacttttgatcctatgttcatgttgcttatttatattgtgggatgtcgaagtatttgccgacttcgccaattttatcatagtagcctttgatgattttagcattgatgttagcccaatctacatctgtagcatattggtgtgttcctggatgtgcaggattccatctcattttgtaaagtgtattttgaccagcttttacatatgagttgccgatgaatttagcaccaccaacgattgcttttgatactgtgtcccaaccagcttgtttagcatatttaataccttcacgtaaaggatcgttatcatatgcagcaataccaaatacgttatggtatttcgtgtttgagttagttacaactttgttgttcactacatctgcacctttcgctaattgagaagtaccgttacctgtttctaatagggcatgtgagataagataaacttcattaatgccatacatttgagcagctttgttaaatgcagcaccttggttttctaatacacctttaccttttaagaattgattaattttatcaatagaaatattttgtggttggtctaagcgtaagaattgatattttaatgctggatcttgagctaaacgcttcgtatccattgcatgcttaacatcattaaatttagcatctgtccacttacctggtacacgttgtacttgtggtttatattgtaaaccagcttgtatttgagcaacttggtttaatgtcatacctgtttgattatacttaattaattctttagctaaatcagttgatttaatccatgctaatttaccgttagataatttaccatagtaccaagtttgtccattaatgacttgttctttaacaactgcgaatggttgttcattaaatgcttttaatgagtatttagctgtatcagaatttggtgttacatagtaataaccattaccatttttaattacataagtgtagttataatctttggcagctgatgtagttggtttcacagcagttggtgcagttaaatcttttgcatttacccaaccagtgcggttattaatagtaccgtataaataaacatctttgcctacagatacttgtttcgttgcattaaatgtaccttgagcaatgttattgcctgttaaaatgacttggtttttagtaccccaaggaaccattgataagccgttatttgatttattaacagtatatttttgagtcgttttaacttctttgcctaagttttgaacatttaagtcttttacattgaaccaacctaatgggatgttatggcttgtattgtttaataatacatacgtttcattaccatgagcacgctcttttgttacatagaacgtacggtctgcatatttcgcaccgtttttcgctgttttttcataaacagaagcacgaataccagtgttgtttggtttaacttgagcaatcttgctaactgtttgagtcgtttgtggtttagtaacagtataagcttttacagctgtttttggttgtgctactgcttttttaggtgcagcaggtacagctaaatatgctttacttacccaaccagatttaccatttacagttccaaataaatagatagatttatcaatttgttgttgcttagtcgctttaaaagtttggttacctgtaccagaaactgcaccagcttcttgtttataagtgccccaaggtactgaatataatttagtgcctggttttactgtatatgtttgcattacatttacaggtgattttgcattgttataaataacgtcaccttgtttaacccaaccaattaaagttggactattgtaatctttaactaagtagaatttgtttccacctaaacttgcttcttttgttacagcaaatgttttttgaacttctttcgttggcttaccagttttgtcataaactgtagtgaataagccattgtttttagcattaatttgagcaacaccgtttaatgatgaaactgttaatttattatttgttgtaggtgttgatggcttaggtgttggtgtaggcgtaggtttagcagtatcaactaaatatgctttacttacccaaccagatttaccattcacagagccatataaataaattgatttatcaatttgttgttgctttgaagccttaaatgtttggtttccagagccagacacactaccagcaacttgtttagatgtaccccaaggtactgtataaagtttcgtaccaggtttgattgaatatgattgatttacatttacaggtgatttagctgtgttgtaaaccacatcgccttctttaacccaaccaaatttattaccagaattgtaatcttgaacaagatagaatttttgattacctaatgtagctgttttagatacagcaaatgttttttgaacttcattagttgctttaccagttttgtcgtatacagtagtatataaaccactatttgttggtttgatttgtgcgacaccattgtttgcagcaactgttaatttaccagttgatggtttcgacggtgttgttggttttgatggtgtagtaggggtagttgtagattgcgtaccccatggcgccactttacccatttttattaaatatttttcattaattaagtcatataattgatcataactataattatgacttcttaaatatccatgtggatcggcatggtcagtaccacctaaatatttacttacagcgtagtgagtccatactgtaccatttccatcatactcagcactgtctggttttaaaccataatattgtaattgtgtagctgcatagtcagcatagttattcattgaacgtgcaaatgaagcatagtcgtgtgtgtgtacgatttcaacattgatgaatctagggttaccgactgcaccgacaccccaagataagtaatccgttggtgctgtttcgattatacgatccccatcaacaaatgcatgtacgaatgcgttttgatagttatttttcatataactaatttcaccatttatcgtcgaacgatcattagctgtatcatgaactacgataccttcaggacgacctacgccgttacggtatgcgtatttagggaagtaagatgtataatcttcttcaattttaggtgcttttaagttatttttacaaatgtaatcgttaattgaagagtttacttgtggtttatattttggcaaactcgtttttggtgttgcagcaactgatcttggttgtgctgaagcgctaaaagtagttactttaggtgtcgcttcagttttagctttaggtgctgatgtagttgcagctttaggtgctgcggttttatattgcgtttcaagagctgcaggtttagcagctgatttaattaattctggattaatttgattttctgaattatcatcttcatcatcaactaaactataaccagcatttgtaacattagtgttagttttaggtgctgtagtgcttgttgactttgcaacaggctgcgtattatttgtagtcgctgattgattagcacgagtgtcaccatttacttgtgcagtatcaactttttgacttacttgagcattgcctgttttgttatttgctgtttttggttggacaatagcagggtcttgatatacttgagtgccagaaatgttttgcgttggattttttacctcagcttttgcttgttcagtagttgctttaactttattactatctaaaacgtttttattagtagtttgatcttgtgtcgtctcagctgcttgaacttgatgtgcagtgactgctgaacctacaagcgttaatgcaaccattgatggtagtttgtaattgaattttttcgccattctatttattactcctaacatttattaattattactaacattatagtacctgttttatatacctgtgcgtatttaaccaatttgtaatatactcttaatttacattttcactgtaaaaaaatgaaaaaaattttgaatctcaatggtgacgtgacaaatcaaatagaattgatgtcaatttaagaattggtttattacaaatgtttctaaaatagatacaactttttttaattaagcgaggttaacttttttgtcatttcaatatgctcgatgccttcctcaagaaatatattacctctcattttaaagtttaaactttcataaaatgggatagcatgacattgggcattcatagtagctacgtaaaaaccttcatctttagctaatgattctacagcttgcataagcattctacccattccttgtccacgatgtgatttcatcacagctactcgttctattttgacagttgtttcattaatagggcgtattcgagcagtggcaactggctgtccattatcatatccaatgaggtgaatagattcagattcatattcatcaatttcactttcctcagggacgccttgttcttctacaaacactttctttcttatatagaagcaatcttctaacatcttttgattgtttacttttgaaaacataaaattcctccacatcctaacaaaatcatttacatttaatttactaataataacatagaataacgattgttattttcctcaaaaataattagacataaaaaagctataaagatgattgttgtgaatcatctttatagctaattaattattaatgttatagtgcttcttttctaataattgctgtatattgccaaaagattcgcatttgagcaatattccaattattcattcccattgtaaatcctgaaggcttaaatatattcacatcagttacttctaaagctgctgcaactaaatattgtaatggaatgctaagtgatttcattgtttcggtaatgccattttcatcatatacccatgaaaatggtaactctgattcgaaaacatcaacactattgaaaatttcaggtagggctaaaatataacatgcaccatctacaataggattgtcgatactatttttgtaataaattaggagtgcttcatagttttctcgatgctcatgattgacgtaaaaaaattcacttctaaaatgagccatatcttggctatgaatgatttgttgttctaacatattaaacatgccatttatatttgcaatcttttcgtatgtttttctactcatgtatgatgctcctttcataaatagtaaatgttaatcgtcatataatattaatttacaacaccattttggttatttgaagcttgtggcgcttgttgtgtgccaccttgattttgatttgagttttgatctgtagcaggttgttgttgattgctggaatcactgttattagttgaatcactgttctcgttagatgtcttatctttatctgtcgtatcattttgttcttttctcaataaactattatctaaaggcgttaatggtattaatgaaccataatgattaatgacacgttgatctaagaaatcatttttatcattaataggtgataattctaagtctttacgaagtaagtttgcatatttttgaatgctttcaacacttggatgataatagtaaataccatttaacatatcatctttaccttttaattgcgcagttttaatttcaacatcatttgttaagtacatttttgctaaagctttaatttcagagttagttaaattatgctttgcatttttacctacaatttgaatcacgttatcaagtttatcaatagaatcaacttcctgtgctttttggaataaaatcttaattaattccatttgacgttgtccacgttttaagtctgaatcatgatgtctagttctagcaactgctaaagcctcatcaccatttaatttttggtacccttttttaattttaatcttaccagtatcatctgtgttaggttcatttaagtcgtatggcacatcatagtatatgccaccaagctcatttacagcctcgacaaatgctttcatattgactctcacataataatcaacaggtacattcatggtagcttctaccgaatccattgcggcaattggaccaccatatgcatgtgcatgggtaatcttatcgtaatagccaactttaggaatgtagctgatagtatcacgtggaatactaagcattctaatttgatgttttgattgattaaaagtagttaaaatcatagcgtctgatctagagtgttcagcatcctgtcctttttttcttcttccatcgttatcatcgatacctaagaaaagaatagagataggttgttcttcgggattgactttattatctcttaagttggattgacgattagcatttttgctgtcttgagaagattcgaatgcatcttgggacgttttaaaaagtaacgtagcgaagactattggaacaacaatgagaaccaatgctagaaggatcaaaaagtattttaaaaatttattcatgattgatgctcctatattaaatttttgttaaatcataatcataattttaaaatataattagttgaacgatatttatacaacttcattactaatacattatagccttaaattgtagtactttatagtaaaaaatacaaatgttatgtcaaagttccttgtaatttgaatgttttgttaaaatcaaaaagcatttttaaaaatataatgcgactttagtatgatgtcttaaaaaatttaaaggcgtaatataaattcgagtgatttatacaaagtgataaggtataattaattttgttgtatagataacatattagaaaaacttattactatgtagcgtaaagcataaatgaatgataagttaatttttgtaagttgtattattaggcatctaggttcaaatttttaacgatttaaatatataaaatgaatacattgtgaggcaattatcaaatgaaatttaataaagtaaaactagttatacatgcgtgtgtactattatttatcattatttctatagcgttaatttttcatcgattacagacgaagacacattctatagacccaatacataaggaaacaaaattatcagacaatgaaaaatatttagtggatcgtaataaggaaaaggttgcgccgtctaaactaaaagaggtatataatagcaaggatcctaaatataagaaaattgacaagtatttacaaagttcattatttaacggttcagtagctatatatgaaaatggcaaattgaaaatgagtaaaggttatggatatcaagattttgaaaaaggtattaaaaacacaccgaatacgatgtttttaataggttcagctcaaaaattttcaacagggttactgttaaaacagttagaagaagaacataaaataaatatcaatgatccagtaagtaaataccttccatggtttaaaacatctaagcctatcccattgaaagatttaatgttgcatcaaagtggattatataaatataaatcctcaaaagattataaaaatttagatcaagcagttaaagcgattcaaaaacgtggtattgatcctaagaaatacaaaaagcatatgtataacgatgggaattatttagtacttgcgaaagtaattgaagaagttacaggtaaatcttatgctgagaattattatacaaaaataggagatcctttaaaacttcagcacacagcattttatgatgaacaaccttttaaaaaatatctagcaaaaggttatgcttataatagtacaggactttcattcttaagacctaatattttggaccaatactatggtgcaggtaatttatatatgacaccaacagatatgggtaaattaattactcaaatacaacaatataaattattcagtcctaaaataaccaatccattattacatgagtttggtacgaaaaagtatccagatgaatatcgatatggtttctatgctaagccaacattgaatagacttaacgggggattctttggacaagtctttactgtttactataatgataagtatgtagttgtacttgcattaaatgtaaaaggaaacaatgaagttcgaatcaaacatatttataatgatattttaaaacaaaataaaccttacaatacgaagggtgttattgttcaataattaatatagaagatataacatgtatatggcattaaggcatcgaccttatctgaccagtatacgagttatatcttcttttttatagtggtaaaaagtttaaagtataaggttgaagaaggatgagtttaaaaatatgtgttaactgataaaaggggaaatcatttggtgagttggcatcagactaaaatgaatgaagacgaatacgttggtccatgcgtggtgtgaatgttttctaaatctaactggaaatgataatttaataatgtacacttttgattgtttaaacatgtacaatttttaaaaacctagggataattttattgacgtgaacaacattgagattatctttagacataaatatggattttgaagttactatatttattagttgtggttgttaatgtattaattgaattgattataatgattgtcttataagatatagaaggggacttaaccatttaaaaattgaaggaaaataaaaaccagctaacaaaagtgttagctggttaaactttacattattaaaatgttgtttataagtgtgaagagtgaccgccttgcataacccaatatgttccgacaacgaaacaaagtgtaattacaagagcaaagataactttgaatgtttgtaaacgtccatctttaccttcagttaaatgcatgaacattaataattgaagtcctgcttggacgaatgcaaagccaaagataattgtcaacttcgcgtggaatgttaatgacgtgtatagtgttacgtaaactgctaaaagcgttaatacgatagatgcgataaatcctacagtatgtttcattattgtactcatccgctatacaccatccctatcatatatacggcagtaaagatgaaaacccaaacaacatctaagaagtgccagtataaacttactataaataattttggcgcattatatttgtctaatccgcgtcgttggatttggattaataaacaaatggcccaaacgatacctagcgatacgtgacaaccatgcgttcctaataggataaagaaactagaccagtaagaaccaattgttgggttaacgccttctgatgcatagtgtgcgaattcataaatttcgaatccaacaaagactaaacctaaaagtaacgtaatgatcatccaaaacatcattaacttttgtttttcttggcgcatgtagtaaatagcaataccacatgtgtaagaactgaataataatgcaaacgtcattattaaaacaagaggcaattcaaataactcagtagtcattttacctgcataatcgccaccatgttgcaaagttaatagtgtcgcaaatagggtaccgaataacgcaaattcggctgtaatgaaaatccaaaagccaagcttatttaattcgccttcatgtgtgcgtgaatcaatagtgtttgtatcatgactcatgacttacagcctccctttctttaatacgcgcttctcttaatctagcttcagtttctgcaacttcagcagcagggatatgatatccgtgatcgatttggaaactgcgataaatcatagtaccaaaaataccgaataaacaaattaatgctggaattacagtttcgaaaattaagaagaaaccgccgatagtcataaagataccaatccagaatccaacaggagtattgtttggcatatgaatgtctttgtaattatggttgtctaagtaatgacgaccatgttctttcatatcaacaaatgtgtcgtagtcattccaatctggtgtaatggcaaagttgtatttaggtggaattgctgatgcagtagtccactctagagtacgaccaaggccatcccagttatctccagttgcttcacgtggagatttgaagtgactgtatacgatactaacaacaaggaataagaatccgattgccattaataatgcaccgatagttgaaattaagtttaataagaaccaaccatctgatggcatataagtgtataaacgacgtggcataccatctaatccaagaatgaattgtggtaagaaacaaacgttaaatccgatcatgaagaaccagaagcaccatttgtttaatgtttcgtttaatttgtaacccatcatctttggataccagaagattaaaccagctaagcaggcaaatacaacaccagtaaccaatgtatagtggaagtgagctactaagaagtacgtattgtgatattgatagtcagctgatgccattgctaacattacacccgtaacaccacctaaaaggaagttagggataaatgctaatgagaatagcattggtgactcaaatgtaatacgtcctttatataatgttaataaccagttaaacaatttcacaccagttggaataccaatcagcattgttgaaattgagaagaatgagttgattaacgcaccattacccattgtgaagaaatggtgaacccaaactaagaaactaaggaacgcgataccggcagttgcccataccatactttgatgtccgaataaacgcttacgagcgaatgtcgggataatttctgagtaaataccaaatgctggaaggataacgatataaacttcagggtgcccccatacccagaagaagttagcccaaagcattggcataccgccatgtgcaactgtgaagaatgctgtgtcaaatattctatcagttgtcattaatgctaacgctactgttaaaggagggaaagcaagaataacaattaatgtagtaataaatgttgttactgtaaacattggcatttgcataaacttcatagttggtgttttacatcttaaaattgttacaaagaagttgatacctgtagctaaggtaccaagccctgaaatttgtatagctattaagtaatagttaacacccggaccaggactgaattcacctgctagtggcgcatagtttgtccaaccagctgctggtgaaccaccaataataaatgacaggttgaataaaatcatacctgcaaagaatagccagaaacttacgttgtttaatactgggaatgcaacatcacgtgctccaatttgtaatggaacaacgatattccataaaccaaagataaatggcattgccatgaagataatcatgattacaccatgtgtactaaaaatttcgttatagtggttagattctaaaaatttgttatcaggtactgttaattgcgcacgaataagtaacgcatcaataccaccacggacgaacattaatacggcacagattaaatacataataccgattttcttatggtctacagatgtgaaccattctttgtaaagatatttccataatttaaagtaagtaattactgcgattaaaccaataactaagaatggggcaccaatttgtgccattgtaatcatccagttacctttaactagtaattgatcccatggaaaattcattaatgtccacctccatgatcatcattgtcttgatcttgcgcatcttttgaaattttcttcatttctttcgcatttttcgattcatctttcttgaactcattgttatatggttcgtcatttccaagaatcatcaacttcataccatgtcgtttatagttcgcatttgtaatttgagctttacgagcaggtattaatggtttgtctgatacatctttaaacatattttcttcactagtgaagtttggatctttcaattcgaaattgaaacgtttatatgcatagaagatgtattctggatcggctgctggatcaacaaacgccatatgtgtaccattaaattctaaagctttattaggtgtgcttggtaataattgtttatcaaatgtatcttgatctaacgttttcttacctttaacttctttcacccatttgtcgtagtctttttgactaacggcatttactttaaatgtttgacgtgagaatccttcaccattgaagttagagttacgacctctgaacgtaccagtttgagatgcttctaacgtccaattcattgtcatgccagtcatggcatatttttgaccacctaattgtggaatccagaaacttgtcattgtatccatagcttgaagcttaaatacaacaggacgatctttagggattgttaatgtattaacagtctctatatgttcatctggataagcaaagaaccatttgtatcctgcacttactgcatatacaaccattggatctttctcactcttcggtggtttttcgtaatcgtataaagttttaactgtaggaatagctaaagcagcaacgattatgataggtattacaaaccatattgtttcaatgatggcattatggtgcatcttaccagattcggcattcttattataactatacttgtaaataaaaatggcgaacatgccaagtacaacgaaacaaataacaagcatgaagacgattgaataaagaatcaagaacttctgactacttgctactggcccttttgcgttgaaaatttctatatttgaacaaccactaagtaaaattagtgtgccaaataatagaagcaaagacttaaattttgacacttttttgacctcctaatactacaaatgtagggcttaacattaattttaagttattacacaatatttacaagggcttatgggaaaaaaattaataaaattgtatcaaaaatgttgataaatcaaggtgtgacgtgggttcacacatttgttaaaattatgtgtacattttgtgactaatagcgtttttgaaaaaattgcttcatatttaaaaggaaagttgagaatagctttcaattaaaggttaattgaatgaaaataaaaaaagtttgaaattgtctaataaattgaaaatgatggctagttgattgaaaggaagcgcaaacattttaataaggaatttgccaaaagtaatttatcgttaaacaatgaaaagtggaaatttgtttgttcaaaatcaaaacatttttttaaaaagagcagttaagttttaataatttgataggtagtcctttggtatacagaaaaaatacaatatttgggttaaagttgcagatgaagttagaataacaaataaaatggtagcaaaacatgttcgtttgctaccattttatttgcagtatagtgatgagggctatttaacctcaatatacctagtggaaattttaattgcaccatctgaatcagtgacatgatatttaatttgatatttaccagatttagatgtatcaatttggccatcgactttaattttatcggttaaatctccatcttctttatcaaatgcacttatgccgtttagaaggttataatcttgacctttcttaataacgatatcattagcgcctttaatttgtggtgtagtattcgtcgttgcatctgcatttaaatttggtgttactagtgtagcagaaacaccgagggctgataatgactgtaatagtttattcataatgtaacctccgaatgataagtcatttctgagttagctttactataccttaatttatattatttacacatcatactatagtcctaatcttaccctataaagaatgaaatttaaatataaatttataaataatgaggaaataattattattttgaaaatctgccacaattgtaaaattaataatttagggataatttgaaatcaaatataactttattcgacagtttgaacttaaatttttgtgtatcaaaacaataagaaaagggaggcgaaaatgataaagaaccactaatgattaactatgtagtagtactttatcatagtcacagcttctgtgttggggcccatccccaacttgcacattattgtaagctgacttttcgtcagcttctttgttggggcccctgactagaattgaaaacttgttacaagcttattttcattcaattaactactgtctatataaaattgttgagccaagtacaaagtgaaatgctcccttcaaagccttcatttattcaatgtctactttgaagggagcatttgatcgattaatgtcccagatttttcttgttattcattgcaattgcaaaataatatttaatgtgggttaaaagacttcattaaaactcagttattagggagtgggacagaaatgatattttcgtaaaatttatttcgtcgtcccaccccggcaaggttgactagaattgaaaaaagcttgttacaagcgaattttcgttcagtcaactactgccattataactttgtagagcatagaacattgatttatgtctcaggctctttacgaatcaatacctcgacgcattttttctgcaagcaaagtattatttaataccatagtaattgttaatggaccaacgccaccaggaactggtgtaatagctccagcaatttctttaaccgcatcataatcaacgtcaccttttaatttgccattttcatctggcgtattgccaacatcgataattactgctccttctttgaccacatcttttgttactaaaccaggcttaccaactgcactgacaatgacatcagcatcttttaaatatgatgccatatcttttgaacgagaatgtaagattgttactgatgcatttttttgaagtagtaacttagaaactggttgtccgacaatatgacttcgtccaattacaactgcatttttaccttctaaatcaatatcagcatgttttaatatttccatgatgccgagcggtgtgcaaggtacaaaagtttgttcatcgatatataatttccctatatttattggatgaaaaccgtccacatctttttcaggattgattgcttctaatattttctgttcgctaacttgttttggtaatggtacttgtaccaaaataccacttacagaatcatcattatttagtctatttagttcgtttaatacttcttcttcagtagctgtttcttccaaatgtacgatttctgaaatcataccaattttttcagctgctttcttttttgatctaacataactttgactagcgccatcattaccaactaatataacggataatttaggtgtaaaacccttttcttttagcgcttcaacttgatcttgtaacccctgtctgtagtctttggcaatttgtttaccatctaaaattttagcaaccataaaaacttctcctcctattgtcaatatcctaactttgttagtttataaaactaatttacatagcaaaagacgtaaattcaaataaaaaatcaaaataaagttcgatttttgattgaaaaagcagaaattgcttgttatgctatatctataatatacaactaaagtaattcacaattcaaacttttgaaagggtgtacaaagtgaaagtagcagtcattatgggcagttcttccgattggaaaattatgcaagagagttgtaacatgttggattattttgaaattccgtacgaaaaacaagtagtatccgcacatcgtacgccaaaaatgatggttcaatttgcttctgaagcgagagaaagaggtataaacattatcattgcaggcgctggcggtgcggcacatttaccaggtatggttgcatcattaacgacgctaccagttattggagtgccgattgaaacaaaaagtttaaagggtatagattctttattatcaattgttcaaatgccaggaggtattccggttgcaacgactgcaattggtgcagcaggtgctaaaaacgcaggtatacttgcagcaagaatgttaagtattcaaaatccttctttagttgaaaaactaaatcagtatgaatcttcgttaattcaaaaagtggaggacatgcaaaatgaacttcaataaattaaagtttggtgcgactattggcattattggtggtggtcagcttggaaagatgatggcacaatcagctcaaaaaatgggttataaagtggttgtattggatccttctgaagattgtccatgtagatacgttgcacacgaatttatacaagccaagtatgacgatgaaaaggcactcaatcaattaggacaaaaatgtgatgtgattacttatgaatttgaaaacatttcagcccaacaattaaaactattatgtgaaaagtacaatattccgcaaggttaccaagctatacagttattacaagatcgcttaactgaaaaagaaacattaaaaagtgctggtaccaaagttgtcccgttcatttcagtaaaagaatctacagatattgacaaagcaattgaaacattaggatatccttttattgtaaaaactagatttggtggctacgatggcaaaggtcaagttttaattaacaacgaaaaagacttacaagaaggttttaaattaattgaaactagtgaatgcgtagctgaaaaatatttgaatatcaagaaagaagtatctcttactgttacaagaggaaacaacaatcaaatcacttttttcccattacaagaaaatgagcatagaaatcaaatacttttcaaaacaattgttccagcgagaatagataaaacagctgaggcgaaagagcaagttaataaaattatccaatcgattcatttcattggaacatttacagttgaattttttatagatagtaacaaccaattgtatgtgaacgagatagcaccaaggcctcacaattccggacattattcaattgaagcatgtgattattcacaatttgatactcatattttagcagttaccggacaatcattaccaaattcaattgaattattaaagccagcagtcatgatgaacttactaggtaaagatttagatttattggaaaatgaatttaatgaacatccagagtggcacttacatatttatggtaagtctgagcgtaaagatagcagaaaaatggggcatatgactgtactaacgaatgatgtaaaccaaactgaacaagatatgtacgctaaatttgaggggagtaattaaagcatgacattattatatgaaggaaaagcgaagcgcattttctcaacaaatcaagaaaatgaattaagagttgaatataaagatgaagttactgctggaaacggggctaagaaagacacaatggcaggtaaggggcgattaaataatcaaattacttctattatatttaaatatttacaagaaaatggaatagaaagtcactttattaaacaattatctgaaacagaacaattagttaagcctgtgaaaataattccattagaagtagttgttcgtaatattgctagtggatctattacaaagcgtttaggttttgaaaatggtgaagtttttagagaaccacttgtagaatttttctataaaaatgatgcgttaaatgatccgttgataacggatgaccatgttaaattgctcaatatagcatcagatgaagatattgaaatactaaaatccaaagcattaaagattaataatgtgttgaaacaattaatggatgctatgaatttaaaattagtagattttaaaatcgaatttggaaagactgagactggtcaaattttgttagcggatgaaatatctccagatacatgtcgaatttgggataaagctaccaatgcaaactttgataaagatgtatatagaaataacactggatcactgattgaaacatatcaaatatttttaaacaaattggaggatttaaaataatgaaaacaattgaactacatatcacattacaaccacaagtattagatacgcaaggacaaacgcttactcgagctgtacatgacttaggttatgcacaagtgaatgatattcgtgtaggaaaagtattatatatgacagtggatgaggttagtgatgaaaaggtacacaacattattacaactctaagtgaaaaattgtttgcaaatacagtgattgaagaatatagctataaagtgttagatgatgaaaaggagaatgcataaaatgaaatttgcggttcttgtttttccaggttcgaattgtgatagagacatgtttaatgctgctattaaaagtggtgttgaagcggaatatgtagattatagagaaacatcactaagtggatttgatggcgtacttattcctggtggattttcattcggggattacttaagatctggggcaatggctagtgtagcgccgattatttcggaagttaaacgtcttgcagctgaaggtaagccagtattaggtgtttgtaatgggtttcaaattttaactgaaataggcttattacctggtgcattattgcataacgattcacatttatttattagtagaaatgaagagttagaaatagtgaataatcaaacggcatttacaaatctttatgaacaaggtgaaaaagttatatatcctgtagctcacggtgaaggtcattattattgtactgatgaaatatatcaacaattaaaagctaacaatcaaattattctgaaatatgtgaataatccgaacggttcatatgatgatattgcaggaattgttaacgaaaaaggcaatgtatgtggcatgatgccacatcctgaaagagctttagaaacgttgttaggtactgatagtggtgtgaaattatttgaagcgatggtaaaaagttggagggaacaacatgtctaaatttatcgaaccaagcgttgaagaaattaaacttgaaaaagtatatcaagatatgggattaagtgatcaagaatatgaaaaagtttgcgatattttaggcagacaacctaactttacagaaacaggtatcttttctgttatgtggagtgaacattgctcttataaacattctaaaccgtttttaaagcaatttcctacgtcaggtgaccatgtgcttatggggcctggtgaaggtgcaggggtagtcgatataggtgataatcaagccgtagtatttaaagtagagtctcacaatcatccatcagcaattgaaccatatcaaggggctgctacaggcgttggtggaatcattcgtgacattgtctctattggggctagacctattaatttgttaaacagtcttagatttggagaattagataataaacaaaaccaaagattacttaaaggtgttgtaaagggtatcggaggttatggtaactgcattggtattccaacaactgctggtgaaatcgaatttgatgaacgttatgatggcaatccacttgttaatgcaatgtgtgttggtgttatcaatcacgacatgattcaaaaaggcacagcaaaaggtgtaggtaattcggtcatttatgttggtttgaaaactggtcgagatggtattcatggtgctacttttgcatctgaagaattgacggaagaaagcgaaagtaaacgaccttctgtacaaatcggtgatccatttgtaggtaaaaaattaatggaagcaacacttgaagcaattacatttgatgaattagttggtattcaagatatgggtgctgctggtttaacatcttcatcgtctgaaatggcggcaaaaggtggtagtgggttacatttgagattagaacaagtgccaacacgtgagccaggtatttctccttatgaaatgatgctttcagaaactcaagaacgtatgttactagttgttgaaaaaggtactgaacaaaaattcttagatttatttgataagcacgaattggatagtgctgttataggtgaagttacagatacaaatcgttttgttttaacatatgatgacgaagtttatgctgacattccagttgaaccactagctgatgaagcacctgtatatattttagaaggagaagaaaaagattataatacttctaaaaatgattatacacacatcgatgttaaagatactttctttaaattacttaagcatccgactatagcatctaaacactatttatatgatcaatacgaccaacaagttggtgccaatacgataattaagccaggacttcaagcatcggtagtacgtgtggaaggcacaaataaggcaattgcttcaacaattgatggtgaagcgcgttatgtatataacaatccatatgaaggtggaaagatggtagtagctgaagcttatcgaaatttaattgccgtgggtgcaacaccattagcaatgacagattgtttaaattatggttctcctgaaaagaaagaaatctatcaacagttgatagattcaacgaaaggtatggcagaagcatgcgacattcttaagacaccagtagtttctggtaatgtatctttatataacgaaacgaaaggtacttctattttcccaacaccagttgttggaatggtaggtttgattgaaaatgtaaattatttaaatgattttgaacctcaagttggagataaattatatttaatcggtgatactaaggacgactttggtggtagtcaacttgaaaagttaatttatggcaaagttaatcatgaatttgagtcattagatttgagttcagaagttgaaaaaggtgaatcaatcaagaccgctattcgtgaaggactattatcacatgttcaaacagttggtaaaggtggcttactgattaccttagctaaactaagtgcgcattacggtttaggattaaaatcttcaatagatataacaaatgcacaattgtttagtgagacgcaaggccgatatgttgtttctgttaaatcaggtaaaactttaaatattgataatgcaatagaaattggacttttaacagatagtgataatttcaaggtaacaacaccatatacagagattagtgaaaatgtttcagatattaaacaaatatgggaaggggcaattgctcaatgtttaactactcaggattaaacgaagaatgtggcgtgtttggtatttggaatcatcctgaagcagcgcaactaacatatatgggacttcatagtttgcaacatcgtggtcaagaaggtgcaggtatagttgtttctgatcaaaatgaattaaaaggcgagcgaggattaggcttactaactgaagcgattaaagatgatcaaatggaacgattaaaaggatatcaacatgcaattggtcacgtccgttatgctacttcaggtaataaaggtattgaaaatattcaaccgtttctgtatcacttttatgatatgagtgtaggtatttgtcataatggtaacctcattaatgctaaatcattgcgtcagaatttagaaaaacaaggtgctatcttccattcgtcttctgatactgaagtcattatgcatttgatacgtcgaagtaaagctcctacttttgaggaagcgttgaaagaaagtttgcgaaaagttaaaggcggttttacatttgcgattttaactaaagatgcgttatatggcgcagtagatccaaatgctatcagaccacttgttgtaggtaaaatgaaagatgggacatacatccttgcaagtgaaacatgtgcaatagatgtgttaggtgcagaatttgttcaagatattcatgcaggtgaatatgtcgtgattaacgataaaggtattacagttaaatcttatacacatcatacgacaactgcaatttctgcgatggaatatatttattttgctagaccagactcaacaatagctggtaaaaatgtccatgcagtacgtaaagcttctggtaaaaaattagcccaagaaagccctgtaaatgctgatatggtcatcggtgtacccaattcatcgctatcagctgcgagtggttatgctgaagaaataggtttgccatatgaaatgggactagttaaaaatcaatatgttgcaagaacatttattcaaccaactcaagaattacgtgagcaaggtgtgagagtgaagttatctgcggtaaaagatatagtagatgggaaaaatatcattcttgttgatgattccattgttcgcggtacgacaattcgacgcattgtgaaaatgttaaaagattctggtgcaaataaagtgcatgtgcgtatagcatcaccggaatttatgtttccaagtttttacggaatcgatgtttcaactacggcagaattaatttctgcaagcaaatcacctgaagaaattaaagattatattggcgctgattcattagcatatctatctgtagatgggttaattgaatcaattggtttagattatgacgcgccatatagtggcttatgtgtagaaagtttcactggagattatcctgcagggttatatgattatgaagcaaattataaagcgcatttaagtcatcgacaaaagcaatatatttctaaaaacaaacacttttttgatagcgagggaaatttaaatgtctaaagcatatgaacaatctggtgtaaatattcatgctggttatgaagctgtagaaagaatgtctagtcatgttaaacgtacgatgcgtaaagaagttatcggtggtttaggtggattcggtgctacatttgatttatcacaattaaatatgacagcgccagttttagtttctggaacagacggagtaggtacgaaattaaaactagctatcgactatggtaaacatgattcgataggtatcgatgcagtcgcaatgtgtgttaatgatattttaacgacaggtgcagaaccattatattttttagattacattgctacaaacaaagttgttcctgaagttattgaacaaattgttaaaggtattagtgatgcatgtgttgaaacgaatactgcacttatcggtggagagactgctgaaatgggtgaaatgtatcacgaaggcgaatatgatgtagctggatttgctgttggagcagttgaaaaggatgactatgtagatggttcagaagtgaaagagggacaagttgttatagggcttgcgtcaagtggcattcattcaaatggatacagtttagtgcgcaaattaattaatgaatcaggcattgatttggcatcaaacttcgataatcgtccatttatcgatgtctttttagaaccaactaaattatatgtcaaacctgtacttgctttgaaaaaagaagtttctattaaggcaatgaatcatattactggtggaggtttttatgaaaatattccacgtgcattgccagccggatatgctgctagaattgatactacatcatttccaacaccaaaaatatttgattggttacaacaacaaggcaatatagacacaaatgaaatgtataacatttttaatatgggtattggctatacggttatcgttgatgaaaaagatgtatcacgcgctttgaagattttagcagaacaaaatgtggaagcctatcaaattggtcatattgtgaaaaatgagtcaactgcaattgaattgttgggggtataacaatggttaaaattgcgatttttgcatcaggttcaggaagtaactttgaaaatatagttgagcatgttgaatcaggaaaacttgaaaatattgaagttacggcgctatatacggatcatcaaaatgcgttttgtatagatagagcaaaaaagcacgatattcctgtttatattaatgaaccaaaacaatttgattcaaaagcagcgtatgaacaacatttagtaacattattaaatgaagataaggtagagtggattattctagctggctacatgcgtctaattggtccagacttattagcttcatttgaaggtaaaatattgaatatacatccatctctattgccgaaatataaggggattgacgcaataggccaagcatatcatagtggcgatactattactggttcgacagtacattatgttgatagtggtatggatacgggagaaattattgaacagagaaaatgtgatattagaccggacgattcaaaagaacaattagaagagaaagtaaaaaaattggaatatgagttatatccaagtgttattgctaaaattgtaaaataaggagtatgtatgtgatgaagaaagctattttgagcgtatcaaataaaacaggtattgtagagtttgctaaagcgttaacgcaattaaattatgaattatattcaacaggtggtactaaacgtatattagatgaagcaaatgtaccagttcgttctgtttcagacttaacacattttccagaaataatggatggccgtgttaaaacattacatccggctgttcatggtggcattttagctgatcgaaataaaccgcagcatttaaatgaattatcagaacaacatatagatttaattgatatggtagtagttaatttatatccattccaacaaactgttgcaaaccctgatgtgacgatggacgaagcaattgaaaatattgatattggtggtccaacaatgttacgtgctgcagctaaaaactataaacatgtaacaacaattgtacatccggcagattatcaagaagtattgacgcgattaagaaacgattcgttagatgagtcatatagacaatcattaatgattaaagtttttgagcatactgcagaatatgatgaagcgattgtacgtttctttaaaggggataaagaaactttaagatatggagaaaatccacaacaatcagcgtattttgtgagaacttcgaatgctaagcacacgattgcaggcgctaaacaattacatgggaaacaattaagctataacaatattaaagatgcagatgctacactagctttagttaaaaagtttgatacacctgctacagttgcggttaaacacatgaatccatgtggtgttggtatcggtgacacgatagaacaagcatttcaacatgcgtatgaagcggatagtcaatcaatatttggtggaattgttgcattaaaccgagctgtaacacctgagttagcagagcaattgcatagtatctttttggaagtcattattgcaccaaaatttacagatgaagcattagatattttaaaacaaaagaagaatgtaagattattagaaattgatatgactatagacagtaacgaagaagagtttgtttcagtatctggcggatatttagttcaagataaagacaattatgtcgtgccaaaagaagaaatgaaagttgttacagaagtagcacctacagatgaacaatgggaagcaatgttattaggatggaaagttgtaccatcagtaaaaagtaatgcaattattttaagtaataataaacaaactgtaggtataggtgctggacaaatgaatcgtgtcggtgctgctaaaattgcgttagagagagctattgaaatcaatgatcatgtagcgttagtatctgatggatttttccctatgggagatacagttgaacttgcagcacaacatggtataaaggcaattatccaaccgggtggttcgattaaagatcaagattcaattgatatggctaataaacatggtattgcaatggtagtcacaggcactcgacattttaaacactaattttaaaggggcgtaacataaatgaatgtattagtaattggtgctggtggacgagaacatgcacttgcatataaacttaatcaatcgaatctagttaaacaagtgtttgtcattccaggtaatgaggcaatgacacctatagctgaagtacacactgaaatttcagaatctgatcatcaagcgatactagattttgctaaacggcaaaatgttgattgggtagttataggtccagaacagccgctaattgatggattagcagacattttacgagcgaatggtttcaaagtgtttggtccaaataagcaagcagctcaaatcgaaggctcaaaattatttgctaaaaagataatggaaaaatataatattccaactgctgattataaagaagttgagcgaaaaaaggatgctttaacatatattgaaaactgtgaattgcccgttgttgtcaagaaagatgggttagctgctgggaaaggcgttattattgcagatactattgaagcagccagaagtgctattgagattatgtatggtgatgaagaagaaggtactgttgtatttgaaacgtttttagaaggtgaagagttctcgctaatgacatttgttaatggtgatttagcagtacctttcgactgtattgcacaagatcataaacgcgcatttgatcatgatgaaggaccaaatactggtggtatgggggcttattgtccagtaccacatattagtgacgatgttttaaaacttacaaatgaaacaattgcacaacccattgcaaaggcaatgcttaatgaaggttatcaattcttcggtgtattatacattggtgctattttaactaaagatggtccaaaagtaatagaatttaatgcccgttttggtgatcctgaagctcaagtattattaagtcgcatggaaagtgatttaatgcagcatattattgatttagatgaaggaaaacgtactgaattcaaatggaaaaatgaatctattgtaggggtcatgttggcatcaaaaggatatcctgatgcatatgaaaaagggcataaagtaagtggctttgatttaaatgaaaactattttgttagtggattaaagaagcaaggtgatacctttgttacttcaggtggtagagttatacttgccatcggaaaaggtgacaatgtacaagatgcacagcgagacgcatacaaaaaagtatcacaaatacaaagtgaccatttattctatcgtcatgacattgcgaataaagcactacaacttaaataagtaaatttaaaatactaagattagctatgaacgaatctataacgatagattttttcatagcttttttagttgtagagtctaggacattgatttctgtaccaaatttgtgattatgcatatgtaatacaaaagaggcgccacaacatgtttggatgaacaaaataacatgtttgtggcacctcttttgtttagtatggaataaatggttttctttttctatacaatgaatttctaatttagtatctatacaattatggataaaatttaacctacacgaccaagacgaacatcatctatgcccgtgatgggtaaggtgattgaacaataatatgccatagtaataatggcaattaaaactataataaagattatatctttatatgagaaaggtacgttgtaatagtaagtacgaggaccatctctaaatcctttcgactccatcgcaactgataattgatgtgcctttctaatattttggcttaatagaggtataattaaatgcttaaatcgctttaaccctctataatttgccgcgtctatcatctgatagcgcatttttaaagatctgcgaagctgtattaaagaactaatcattaaaggtatcatacgaatggcagccatgaatgcataagcaacttttgatttaacctttaaatgttgcattaaactataaaatatcatgacaacctgagatgtaagtgcgattaagataccgaaaaatgaaatagcaatggttcttaatgatacatgtaaaccacgaactaaactttctgttgtaatatggataaatccgaatttcaaaattgtatggctaccattcccgtataaaatcatgaacagggaagagagtaatgcaaagccaatacttatagttataaaaattgctgtaattttaaactgagtaccattaaacatcaataagaaaactaacattaagatagtgatataaagcataaaatcgaaattatgcacaaatataataaagaaaaatagtataattccaagaaatagtttcgttataatgttgacatcatcaacaaatgattgccgaactttccattgctcatacattcgtatcaccatcacaatctagtaacgcaccatctgaaattttaagtcttcttgatggataacgttcaattatttcatcgtcatgtgtaaccatgacaatactttgtcccaaattaattcgcttttggaaaagtttgatcaactggaatgtattatggctatcaagtccaaatgtcggttcatctaaaaagataatatcagctttagaacttagtgcggtagctacgctaaggcgtcgtttttgaccaatagacaactcataaggatgttgatcttttacattttgtaaatctaaaagttttaaaagttgtatcgtttcatcatcactttgatctttagaaaggtgattaaaatgaatgttaatttcatcataaaccgaatttgttataaattgtaattctgggttttgataaactaggtacatgtgttttgctgcatgtttaatttttgttaaacgctgattttcaaaataaacatcaccttgatatttaatcaattgcataattgattcaagcaaggttgttttaccactaccatttgcccctgtaattgtaatccactcacctagaccaatttctaaatctgagaatgagagcaatgttgatttaccgcgaataatacgtccatttttaaattgtaataagtgtgagtttgttgttggaaagtcaacacgacttggtgcgaattcccatgcacgtggatgccacacaccatattcactgagtaaatgaacatacttctgtaatatgatttcaggacattcatcggcaatgatatttccgttataatccatcaaaatgacgcggtcgacatgattccagatgtgtttaactttatgttcaacgattacaaccgtttgatcttcccaaagttcaattagtttagtccataaatcttctgttgcttgaacatctaacattgctgtcggttcatctaaaaacaatgtttttgattgttgaagaatggtttcaacaattgccaatttctgtttcatcccgccacttaaatctttgatatacgtttcaggggtaacatttaaattgaccatatttaaagcattgataattaacgcatccatgtcttcacgtggtaattgtctattttctaaaacgaatgcaagttcttcgtatacttttggcatacaaaactggctatcagggtcttggaaaataacgccacttaatgggtcaacgattagttcatcatatttcataggtaattcaattaaattaggaacaataccacttaatacattcagaagtgtacttttaccgcaaccagaaggaccgagtaaaagtactttttctttgtcttgaatagtgatatttaaatgatcgaaaattttacgttgaccacttggatattttaatcgtaaatcacttacttttaacactctgaatgctcctcttataagttgtcgtaatcttctttagcagctggtctaaataattttgttacgcctgtcttatctaaagcttttactaaaaggtaagataggacgccggcgactactgcaccactaattaatctaaatacgatgaataatgttaagttccaacctgcaacttcatttaaataaccatagaaataatctatcgggaaagccgcgattgctgtacaaaaacctgctaacatagctaccataactgaacgtgattgatatttaaaaattgcaaagacaagttcacacgctaaaccttgtataaaagcgtaaacgattgtcggaatatcgaaacgacccataatgatagtttcgccggcacctgcagcaaattcagccagtaaagcaatacctggttttggaataattagatagcagacaatcgctgccatgaaccaaaccccgtttgttaattgttcgaggtgaaggcctgtagcttgcacaccattgtaaacaaaccaccataaattgtaaataactgcgaatactactgaaataagtacggttactagtatttcagatagctttaaaccttttgacatttttacatcctcctaataaaaaaacgcacaaccatccataggaaagttatgcgttcacaatatatattagtaaaacatatgtatagtaacactttcctacgctagttcaagctagatcaggttcaaagggtttgagggcaagcctcatctcagtataaaacacccctagtgtgtgcgatttatttaattaattatactgtaagacgtttgtaaacttatgtcaataggttgtcttcatgaaatttcgtttaattcgatttaaaatttataatattagcattggatttaaattgaagatgtagtaggaatgttagtaattaaagatataaaaatatgtgacatgtaataatattgagctgataaatgaagagggatacttatcaatcatacctctttaacaacagtgaagaacccgtgcataatggcttacgaattatagtttataaggaagaagagggatacatgcgccgagcacatgcataaaagcccctaacaactaaaagttgtaaggaaggagagggatacatgcgccgagcacatgcataaaatcccctaacaactaaaagttgtaaggggatttaaattaatttagtgtatcttggatatcttgttttgtttgattaatatcttctgttttttcttcttttttatcttttaatttttcttcaacttctttagctttttctgctgcttttttattttgattttcattagacatgattaattcctcccaaattggataattatttatatataaatcttacccggttgtactttcgttaaacttttctaagtctatagcactatttattcatttatctaaagacaacaacattagattaatatataatgattttgaggtgaacataatgtcttttcttaggaaacacgccgaaattatttttagctatttaatcggtatcgtttcactcttcactggtctcattattttaattaacttgccattaattaaacaattaaatggtggtaaaaaagttgatacacatgttcataatgtgtgggaatttctgaatgcatttttcagtgaaattattaaagtaatgagtcgatttataggtaatttccctatagttagtgcaattgtgataattatattcggtattttagttatgttgattggtcatacattacttagaactattaagtatgactatgatatttctatctttttcttagttatcggtatcatgtactttattattactcttatattaatgactcaagtttatggattctttgcagtgattttcattattccatttacaattcatataggatatatcgtctataaagatgaattgaatcaggaaaatgtaaaaaatcatttcatgtggataattgtgagttatggtataagttacttaattacacaaattgcattgtatggcagaattgatgctaatgaaatagagtcaattgatatcttaagtgtcaatgctttctttataattatgtggttacttggtcaaatggctatttggaatttcttgttcttgcgccgagctttacctttaacaaagcaagaattaggtgaagaggagccagaattatcaagaacaagtaaagggaatgtcacgaatcaaactaaaattcacttgaaacaactccaagataagactacagaatatgcacgtaagacaagaagaagtgtcgatttagataaaattagagctaaaagagataaattcaaaaagaaagttaatgatattatcgatattcaagaagacgatattcctgattggatgagaaaaccgaaatgggttaaaccaatgtatgtcgaactattttgtggtgtcgtcatctttttattcacatttttagaatttaataatcgtaatgcattatttgtatctggtgattggaaattatcacagacacaatatgttattgaatgggttacattattaattctgttattcattattatcgcatatatcgctacaacgttaactttccacttgaaaggtaagttttattatttacaattatttatggggagcattttattctttaaattgttaacggaatttataaatataatgattcatggactattactttcagtgttcattacgccaacattactattaatgttattggcaatcatcatttcttattcgttacaattacgagagcgaccataattaaaagcattataaaagtactatctattaaacattttgatgtgtacgctataagttagatatatctctaacttacttagatacaggtcaatgaagtttatggatagtactttttttgtaactagatttgattgattcaggtgatgtgaattaagtattgaaaattgtatacaaagttttagtgcaaataaaatagttgaaaagttatccatttgtaaaatcaagaaaactagtaaatagttgaagcgacttatggaatttgcgaaacgatatatagtatttcctttgtagaaatttaacatatatcattcaaattactaatttgttaaaatcaacagtaagattagaagtagatgatattgaaatttggcaaacaatttaatctatataaaactacaacgaaacacagaaaggaagttgtcagatgaaaatagcaactctgaacaaaggcaaagaaacaaaatattttaatggatatcctttaattgaagaagaggatatctattcacaagatcatttaaaagaaggagatatttttcaaattgtgactgataaatcacaatatgtcgcaacggcttatgttggtcgccaacataaaggattaggttgggttctaacatacgataaagctcaacaaatcaacacagctttctttgtaaaattgtttaatactgcattagcagaacgtgattattattttaatatagatggaacaaatgcttttagattatttaatgctgaaggtgatggtgttgggggattaacaatcgacaattacgatggtcatttgttgattcaatggtactcaaaaggtatttataaatttaaatatgccattcttgaagcggttagaaaagtatttgattataaatctatttacgaaaaagtaagatttaaagacagcgaatatagtggtggttttgttgaaggagatgcacctgagtttccaattgttatcgaagaaaacttcacattttataatgtagaccttgaagatggtttgatgacaggtatctttttagatcaaaaagaagtgcgcaagaaattaagggatcaatatgccaaagaacgccatgttttaaacttatttagttatacaggtgctttttctgcaatagcagcaagtgaggcatcttcaacaacaagtgtagatttggctaatcgttctcgtagtttaactgaagaaaattttggattaaatgctattgatcctaaatcccaatatatttatgtcatggacacttttgatttctataaatatgctgcacgacatggacatagttatgacacgatcgtgattgatccacctagctttgcgcgtaacaaaaaacgtacattttcagtgcaaaaagattatgacaaattaattaatggcgccttaaatatcttatcatctgaaggaacattattgttatgtacaaacgcaagtgtatatccattaaagcaatttaaaaatactattaaaaagacgcttgaagagagtggcgttgattatgaattaactgaagttatgggattaccaaaagattttaaaacgcatccacattataagccatctaaatatttaaaagctgtttttgtaaatattagacattaatttgataaaaaggggtatagtaacttattgagaaaaagaagggtgataatattatgggattcaaaaacaatttaacatcaaatttaacaaataaaatcggtaattcagtctttaaaatagaaaatgttgacggaaaaggtgcaatgccaacgacgattcaagaattgagagaaagacgacaacgtgctgaagcaattgtaaagagaaagtctttaatgtcatcaacaatgagcgttgttccaattccgggtttagattttggtgttgatttaaaattaatgaaagatattatcgaagatgttaataaaatttatggtttagatcataagcaagttaatagccttggggatgatgtgaaagaaagaattatgtctgcagcagcaattcaaggtagtcaatttattggtaaaagaatttcaaatgcatttttaaaaattgtaattagagatgtagctaaacgtactgctgcaaaacaaacaaaatggtttcctgttgtaggacaagctgtgtctgcatctattagttactattttatgaataaaattggaaaagatcacattcaaaaatgcgaaaatgttattaaaaatgtcatgtaggtgctataatagttttgcaatttgcaaattttactgaaaccggttttaaacgaattgaatttaaagcatggttttggtaaagttaatgtataaaactaagttagtattgtaataatattgaagattctaactatacgaaggagaaatgtaattatggaacaaaattcatatgtaatcatcgacgagactggtattcacgctagaccagcaacaatgttagtacaaacagcttcaaaattcgattctgatattcaattagaatataacggtaagaaagtaaacttaaaatcaatcatgggtgttatgagccttggtgttggtaaagatgctgaaattacaatttatgctgacggtagtgatgaatctgacgccattcaagcaatcagtgacgtcttatcaaaagaaggattgactaaataatcatgtctaaattaattaaaggtattgccgcatctgatggtgtcgcaattgctaaagcttatttattagttgagccagacttaacattcgacaaaaatgaaaaagtcactgatgttgaaggagaagttgcaaagttcaatagcgctatcgaagcttctaaagttgagttaactaaaattagaaataatgcagaggttcaactaggtgctgataaagctgctatctttgatgcacatttattagttttagatgaccctgaattaattcaaccaatccaagataagattaaaaatgaaaacgctaatgctgctacagcattaacggatgtaacaacacaatttgttacaatttttgaatctatggataacgaatacatgaaagaacgtgcggctgatattcgcgacgtttctaaacgtgtgttatcacatattttaggtgtagaattaccgaatccgagtatgattgatgaaagcgttgttattgtagggaatgacttaacgccatctgatactgctcaattaaataaagaattcgtacaaggttttgctacaaacattggcggaagaacaagtcactctgcaattatgagtcgttctttagaaattccagcaattgttggtacaaaatcaattactcaagaagttaaacaaggcgacatgattatcgtagatggattaaatggtgatgtaatcgttaatccaactgaagatgagttaatcgcttatcaagataaacgtgagcgttattttgctgacaagaaagaattacaaaaactacgtgatgctgatactgttacagttgatggtgttcacgcagagcttgctgcaaatattggtacacctaatgatttgccaggtgttattgaaaatggtgcacaaggtatcggcttatatagaactgagtttttatatatgggtcgtgaccaaatgcctacagaagaagaacaatttgaagcttataaagaagtattagaagcaatgggcggtaaacgtgttgttgtacgtactttagatataggtggagataaagaattatcatacttaaacttgcctgaagaaatgaatccattcttaggttaccgtgcgattcgtttatgccttgcgcaacaagatattttcagaccacagctacgtgcattattacgtgcatcagtttatggtaagttaaatatcatgttcccaatggttgcaacaattaacgaatttagagaagctaaagctatattattagaagaaaaagaaaaccttaaaaatgaaggtcatgacatttcggatgatatagaattaggaatcatggtagagatacctgcaacagcagcattagctgatgtctttgctaaagaagtagatttcttcagtatcggtacaaatgatttaattcaatacacattagctgctgaccgtatgtcagagcgtgtatcatatctataccaaccatataacccttcaatcttacgtttagttaaacaagttattgaagcgtcacataaagaaggtaaatggacaggtatgtgtggtgaaatggctggagatgaaacagctattccattattgcttggtttaggtttagatgagttctctatgagtgcaacgtctattctgaaagcaagaagacaaattaatggtttaagtaaaaatgaaatgactgaacttgctaaccgtgcagtcgactgtgcaacgcaagaagaagttattgaattagttaacaactacgtaaaataattaattctttcgaaagacagaattataaataaacccgaagtattcattgtaagtaattatgaatacttcgggttcttttttatgatttatgttaatttcaatggaatgttgttgctaactaattaaacaactatgtgtcattaacaaaatgtagttctttaattaatgttagttaatttaaaaatcgatatttaatttatgatagctataaatgatgaagttgatttagatgaaaattaatcttggatatttaatactttgttgatttcatcaagatcaacatggtacattggattgccattcaacaaaataaacggagttgaaaaagcatcaaaatctatcatttcgtttcgatattgttgattgttgatatttctctcttcaaaatcaatgtgatgctcatttagataattttttacaaatgtacaaggtggacaatcattctgcgtataaacgattatttctgacatgtatcatgctccttcgtgctttattctaatgtaatatacacaattatacattgaaattcaaatttgtgaacacattgtgaactgacataaattatacacaatttcatagcgcataatgttttaaaaatacacattatagcaattataattaagttcattgtgttgtcatcaaaaaaagaaaaaggtgatgtttttaaatggatacagttgaaatcagtcggtttttgacagctatgactttagcagttcatatcatttttgcaacgattggtgttggtatgcctttaatgttcgcaattgcagaatttttaggtattcgcaaaaatgatcttcaatatatagctatggccaaaagatgggctaaagcttatacaattactgtagcagtgggagttgttacaggtacaattataggacttcaattatcattgatttggcctacatttatggaaatgggtggacacgttattgcacttccattatttatggaaacatttgcgttcttctttgaagctattttcttaagtatatatttatatacttgggatcgttttaaaaataaatggacacatttcttaattagtataccagtaattattggtggctctttctcagcattcttcattacttcagtgaattcatttatgaatacgcctgcaggttttgagttgaagaatggaaagatggtcaatgttcaacctatagaagcgatgtttaacccatcgtttatagttcgatcatttcacgtaattactacagccggtatgacgatggcatttgttattgcatcaatagcagcttttaaattattgcgtaatcgtcaacctaaagatactgtctaccataagaaagctttgaaaatgtctatgatagttggattcttttcaacattactttctatgttggcaggggatttatctgcaaaatttttgcataaattccaacctgaaaaattagcagcttatgaatggcatttcgatacatcttcccatgccaaattattattatttggtgtgttagatgaaaagactcagcaagttaaaggtgcgattgaattacctggactattgagtttcttagcagataatagtgtcaaaactaaagtacaagggttaaatgattttccaaaaagtttacatccgcctatgatcgtccattatttctttgatttaatggtaacgatgggaattttatgttttgtcatttcaggtgtttatgtcttaactttaatgtttaaaaagcttagaaagttttctactcataaatggatgctttatggaatattattaacaggcccagcttcaatgctagctatagaatttggatggttcttaacagagatgggtagacagccttggattgttcgtggttatatgcgcgtggcagaagcagcaacacaagcaggcggaataaccttcgttacaattttatttggcatattgtacatcattttaatgtatacatgtgcatacgtattaattcgtatgtttaaaaataaaccggcgtatgaagatgtaaatcgtttagccaagaagcaaggaggagaaatagaaaaatgatttatgcatttataggtataacagtgttatggttgtttttattttgctatatcattattgcttctatagattttggggcaggtttcttcgcattgcattcaaagttaactggtgatgaaaagaaaattaatcacttaatttcacgttatttaaacccagtttgggaagttacgaatgtattctttgttttcttcttcgtaggattcgtaggtttctttccagagtcaatcaaatatttaggcacggtattgttaataccaggttcaatagcactgattatgatatcgttgagaaacagtttttatgcatttgaaaattatggtcaagatacaaaattagcatggatgatcatgtatggggtaagtggattattaattccagcttcattatctactgctttaactattacagaaggtggctatattaatgttcgaaacaatgttatcgatctagattgggtgcagttattattaagcccatttgcttggtctgtagtattcttggcaattatttcagttttatatatttcatcaggatttttgacatattatgctaaaaaagcaaatgacgaaccagcatataatttaacaagacaatggcacatatttttagggccgccgatgattatcatttgtttattcgtatttctatcattacgcattcaaaattctgaacatttttattcagctgtttttgactattggtggatgtttggtataagtttcttattctttgcattagcttcattgttaacattctttaagaaaaaacatggtttggcttttgtatttgttattttacaaatgatgttcgcgttctttggctatggaattagtaaattgccataccttttatatccgtttgtaaaaattacagatgcatatgttaatccagaaatgggctggacattagtgattgtctttattttaggtttacttttattacttccatcgttaatattattattaagattatttgttttcgacaaagaatatgttgaaggaaagaaatcataagttgagacgataccccaactttcatttacttgcattactgcatttagataatttagttggggtactcatttataataattttaaatttatattttcaatgaattgatgaaaatcatttaatggagggcgagtatgggtaaagaatatgtagtcatcggtctaggtcgttttggaggtagtatcgttcgtgagttgaatgcattagacatggatgtaatggccatcgaccatgatgaaaatagagtgaatgaatatagtgatatcgctactcatgcggttgttgcagacactacagatgaagcagttatgaaaagtttaggtatccgtaactttgatcatgtcattgtggcaattggtgaaaatattcaatcaagtacgttgacgactttaattttaaaagagttaggtgtaaaaaaagtaactgctaaagcacaaaatgattatcatgcaaagattttaaataaaattggagcagatacggttgtgcaccctgagcgtgatatgggtagacgtattgcgcataatgttgcgagtgcaagtgtacttgattatcttgagttggcagacgagcattctattgtagaattgaaagcaactgaaaagatggcggggcagtctatcattgatttagatataagagcacaatatggaattaacattattgcaattaaacgaggcaaagagttcatcatttcaccaaatccaaatattaatttagaaataggtgatattttaatcatgattggacatgataatgatttaaatcgctttgaaaaaaatattgcgacgagataatcgggagtgggacagaaatgatattttctcaaaatttatttcgtcgtcccaccccaacttacattgtctgtagaaattgggaatccaatttctctttgttggggcccacaccccaactcgcattgcctgtagaatttcttttcgaaattctctatgttggggcccctgactagaattgaaaaaagcttgttacaagcgcattttcgttcagtcaactactgccaatataactttgtagagcattgaacattgatttatgtctcaagctcatcatatataaagaaaaagctactaacaatgggtggtgagtttaattaaaacttcacttcaaagttagtagctttttgattatttattgtttgattctttttgttcgtttaccttcataatgactggtaaaatcattggttttctagctgttttttcaaataaataaggttgtaatgtttcaatgatagaagatttaatctgatgccattgaatatctttattttgatttaacttactaataacatcagttttgattttgcgttgtgcatcataaattaattgacctgattccctcatatatacaaatcctcgagaaataatgtctggaccagaaagtaatttatttgtattaaaatcaatactaacaacaacgataactaaaccttcttcagataatagcttacggtctcttattacaacattaccgatatcaccgataccactaccatcaacaagtacattaccagatggaatgcgaccagctttacgtgctgaatcgtgtgttaaagctaagacatctccaatatcaaagatgaagacattatcttcttcaacgccgcattcaacaccagtctcaccatgtgcttttaacatacggtattcaccatgaataggtaagaaatatttcggcttgattaatcgaagcattaattgttgatcaccttgagaaccatgccctgaagtatggatgttagaaatcttgctatggataacatctgcaccagctttatacaaggaattaatagttctgttaatactttttgtattacctgggataggtgatgaactaaatacaacggtatcttcaggtataattttaatttgcttatgagtaccattagcaattctagataatgctgccattggttcaccttgtgaaccagtacatagtatcaataactcatgcttcggtacggtattaattttattaggttcaataaatgtttcaggtggtgctttaatataaccaagttccatacctattttaatattgttttccatcgaacgaccgaacgtaacaattttacggttatttttgatagcagcttcaactgcttgttgaactcggtaaatattagaagcgaaggtagcaaatataatacgacctttacaattacggaagatcttatctacgttttgaccaacttcacgttcgcttaaagtaaaatcaggcacaagtgaatttgttgagtctgaaagtaaacatagaacgccttcttcgcctaattgagccattttagcaatgtttgctggtttgcctacaggtgtaaaatcaaatttaaagtcaccggtatgaactacttttccttcaggtgtatctacgatgacgccataagtttcaggaatactatgtgtagttaagtagaaagaaatcgtaaagtgcttagatttaatcacactgtcctcattgatttcatttagtttagcagtacgtaataaatgatgttcttcaagtttattacggattaaacctaatgctaaaggaccaccataaataggtatattaagttgttttaataggaagggcacaccgcctatatggtcttcgtgaccatgtgttataaataggccaacaattttatcttggttttgaactagatatgtgtagtcaggtataacataatcaatccctaataagttatcatcagggaatttgatacctgcatcgataatgacaatttcgtctttatactcaactgcataagtatttttaccgatttcacctagacctccaagtgcatatacacctacttcatttggatgtaattgtttcattatttagcaatctccacattaaagtgttctgagttttctttttcgtaatctaaatgtgcgccctctaatttagtgataaattcgatattaaaattacgatctttcaagtaacgacgtacttgttcttctgtttgagcttcaacataaagtgattgtgtattttcacgcacaattacctcgtctctgttatgttgataaaaaactttaaatactgccatgttaaaaattcctcctaagaatgtttgtttaatttattgttaaccctagtaaaatcgtattggagtatatatcgataaattcattccaatcatctctataatgtaacttaataacgatttggttaataactaggttcatcatgtcgttcattttaaaaaattagtgaaataacactaaaatttcagttaaatcttattttacatgatgaatgataataaataaagcagtttatctcactagaaatctaagtatttcgaataaatgtgcagttctatttattaaaataaatgtagagattataaattaatgttaagaaagaattaaaggattttatatgaaacggtaaaatttaaatgaggggataaaaagtttggtagaaaggtgaatatatttaactgttgtttattcgaaaaagttgtaaaaggaaaagcttaggacatcatatttatcctaagctttgataattagaaaaatgtgttttaaacttctactgcatctgtatgtggttgtaatgggtgatctttgtcaatgtgatcatagaacattacaccatttaaatggtcaatttcatgttggaaaacaattgctggatatccttttagtcgtaattgtatatcattaccttcgatgtctttggctttaattgtaattctattatgacggtgaactagaccagcaacattatcatcgacactaaggcaaccttcaccagttggtaaataagcttcttgaacgctatgacttacaatttttgggttcacaagcatatagtcataagatttgccactgccatcatctggtattaaaacagcaatcatacgtttagaaatattaatttgaggtgcagccaaaccaacgcctgaacgtaaaccatatcgtttcgcgatttcctcatcttgactatttactaaaaactctctcatggcgattaatgtttctttttcttctttagttaatggtaattctaactcagctgctttttgacgcaaagttggatgaccatctctaatgatgtctttcattgttaacatatattgcaccttccttattttaatttgttttagttgaatgacagtaaaaaggttgttaagatactcatacatttttatgtgtaaatatctacaaagttaaccaactactgccaatgtttattttagatagtatatgtaaattttcagatatgctaattgcttaaaaaatgattaaagtgttggtttcaagcaatgatactttagaaatttatttatcatcttgactttaaaaattatattataaatgacgtaactgtcaacagatatacttagtaatgaagatgtgtaatgtaattgtttaaaattgatttccaagcagattttatttatcatttaatttaaatagcaagtggaggtacaagtaatgaaatttggaaaaacaatcgcagtagtattagcatctagtgtcttgcttgcaggatgtactacggataaaaaagaaattaaggcatatttaaagcaagtggataaaattaaagatgatgaagaaccaattaaaactgttggtaagaaaattgctgaattagatgagaaaaagaaaaaattaactgaagatgtcaatagtaaagatacagcagttcgcggtaaagcagtaaaggatttaattaaaaatgccgatgatcgtctaaaggaatttgaaaaagaagaagacgcaattaagaagtctgaacaagactttaagaaagcaaaaagtcacgttgataacattgataatgatgttaaacgtaaagaagtaaaacaattagatgatgtattaaaagaaaaatataagttacacagtgattacgcgaaagcatataaaaaggctgtaaactcagagaaaacattatttaaatatttaaatcaaaatgacgcgacacaacaaggtgttaacgaaaaatcaaaagcaatagaacagaactataaaaagttaaaagaagtatcagataagtatacaaaagtactaaataaggttggtaaagaaaagcaagacgttgatcaatttaaataattaatataatacagatggtaggaaacaactaatacagttcctattatctgtatctttttttattaaaacagaactttttcaaatggtttaacagtcccatttatttgtggtacaattagtaaggataaaatgaatttctatacaattatgggaaaggtatggtgaattgaatggctcctaagttacaagcccaattcgatgcagtaaaagttttaaatgatactcaatcgaaatttgaaatggttcaaattttggatgagaatggtaacgtcgtaaatgaagacttagtacctgatcttacggatgaacaattagtggaattaatggaaagaatggtatggactcgtatccttgatcaacgttctatctcattaaacagacaaggacgtttaggtttctatgcaccaactgctggtcaagaagcatcacaattagcgtcacaatacgctttagaaaaagaagattacattttaccgggatacagagatgttcctcaaattatttggcatggtttaccattaactgaagctttcttattctcaagaggtcacttcaaaggaaatcaattccctgaaggcgttaatgcattaagcccacaaattattatcggtgcacaatacattcaagctgctggtgttgcatttgcacttaaaaaacgtggtaaaaatgcagttgcaatcacttacactggtgacggtggttcttcacaaggtgatttctacgaaggtattaactttgcagcagcttataaagcacctgcaattttcgttattcaaaacaataactatgcaatttcaacaccaagaagcaagcaaactgctgctgaaacattagctcaaaaagcaattgctgtaggtattcctggtatccaagttgatggtatggatgcgttagctgtatatcaagcaactaaagaagcacgtgaccgcgcagttgcaggtgaaggtccaacattaattgaaactatgacatatcgttatggtcctcatacaatggctggtgacgatccaactcgttacagaacttcagacgaagatgctgaatgggagaaaaaagacccattagtacgtttccgtaaattccttgaaaacaaaggtttatggaatgaagacaaagaaaatgaagttattgaacgtgcaaaagctgatattaaagcagcaattaaagaggctgataacactgaaaaacaaactgttacttctctaatggaaattatgtatgaagatatgcctcaaaacttagcagaacaatatgaaatttacaaagagaaggagtcgaagtaagccatggcacaaatgacaatggttcaagcgattaatgatgcgcttaaaactgaacttaaaaatgaccaagatgttttaatttttggtgaagacgttggtgttaacggcggtgttttccgtgttactgaaggactacaaaaagaatttggtgaagatagagtattcgatacacctttagctgaatcaggtattggtggtttagcgatgggtcttgcagttgaaggattccgtccggttatggaagtacaattcttaggtttcgtattcgaagtatttgatgcgattgctggacaaattgcacgtactcgtttccgttcaggcggtactaaaactgcacctgtaacaattcgtagcccatttggtggtggcgtacacacaccagaattacacgcagataacttagaaggtattttagctcaatctccaggtctaaaggttgttattccttcaggcccatacgatgcgaaaggtttattaatttcttctattagaagtaatgacccagtcgtatacttagagcatatgaaattgtatcgttcattccgtgaagaagtacctgaagaagaatatacaattgacattggtaaggctaatgtgaaaaaagaaggtaatgacatttcaatcatcacatacggtgcaatggttcaagaatcaatgaaagctgcagaagaacttgaaaaagatggttattctgttgaagtaattgacttacgtactgttcaaccaatcgatgttgacacaattgtagcttcagttgaaaaaactggtcgtgcagttgtagttcaagaagcacaacgtcaagctggtgttggtgcagcagttgtagctgaattaagtgaacgtgcaatcctttcattagaagcacctattggaagagttgcagcagcagatacaatttatccattcactcaagctgaaaatgtttggttaccaaacaaaaatgacatcatcgaaaaagcaaaagaaactttagaattttaatacattttaaaagttaacgaagttagcgtattttagtctcattgattaaaatgaaatgtttaatttacgaaatcttaggagggcaaaaacgtggcatttgaatttagattacccgatatcggggaaggtatccacgaaggtgaaattgtaaaatggtttgttaaagctggagatactattgaagaagacgatgttttagctgaggtacaaaacgataaatcagtagtagaaatcccatcaccagcatctggtactgtagaagaagttatggtagaagaaggtacagtagctgtagttggtgacgttattgttaaaatcgatgcacctgatgcagaagatatgcaatttaaaggtcatgatgatgattcatcatctaaagaagaacctgcgaaagaggaagcgccagcagagcaagcacctgtagctactcaaactgaagaagtagatgaaaacagaactgttaaagcaatgccttcagtacgtaaatacgcacgtgaaaaaggtgttaacattaaagcagtttctggatctggtaaaaatggtcgtattacaaaagaagatgtagatgcatacttaaatggtggtgcaccaacagcttcaaatgaatcagctgcttcagctacaagtgaagaagttgctgaaactcctgcagcacctgcagcagtaacattagaaggcgacttcccagaaacaactgaaaaaatccctgctatgcgtagagcaattgcgaaagcaatggttaactctaagcatactgcacctcatgtaacattaatggatgaaattgatgttcaagcattatgggatcaccgtaagaaatttaaagaaatcgcagctgaacaaggtactaagttaacattcttaccttatgttgttaaagcacttgtttctgcattgaaaaaatacccagcacttaacacttcattcaatgaagaagctggtgaaatcgttcataaacattactggaatatcggtattgcagcagacactgatagaggattattagtacctgttgttaaacatgctgatcgtaagtctattttccaaatttcagatgaaattaatgaattagctgttaaagcacgtgatggtaaattaacagccgatgaaatgaaaggtgctacatgcacaatcagtaatatcggttcagctggtggacaatggttcactccagttatcaatcacccagaagtagcaatcttaggaattggccgtattgctcaaaaacctatcgttaaagatggagaaattgttgcagcaccagtattagcattatcattaagctttgaccacagacaaattgatggtgcaactggccaaaatgcaatgaatcacattaaacgtttattaaataatccagaattattattaatggaggggtaaaacatggtagttggagatttcccaattgaaacagatactatagtaatcggagcaggtcctggtggatacgttgcagcaattcgtgcagctcaattaggacaaaaagtaacaatcgttgagaaaggtaatcttggtggtgtttgcttaaacgtaggatgtattccttcaaaagcattactacatgcttctcaccgttttgttgaagcacaacattctgaaaacttaggtgttattgctgaaagtgtttctttaaacttccaaaaagttcaagaattcaaatcatcagttgttaataaattaactggtggtgttgaaagcttacttaaaggtaacaaagttaacatcgttaaaggtgaagcatatttcgtagataacaatagcttacgtgttatggacgaaaagagcgcacaaacatacaactttaaaaatgcaatcattgcaacaggttcaagaccaattgaaattcctaatttcaaattcggtaaacgtgttatcgactcaacaggtgctttaaacttacaagaagtaccaggtaaattagttgtagttggtggaggatacattggatcagaattaggtacagcatttgctaactttggttcagaagtaaccatccttgaaggtgctaaagatatcttaggtggcttcgaaaaacaaatgacacaacctgttaaaaaaggtatgaaagaaaaaggtgttgaaatcgttactgaagctatggctaaatcagctgaagaaacagataacggagttaaagttacttatgaagctaaaggcgaagagaaaacaatcgaagctgattatgtattagtaactgtaggtcgtcgtccaaacacagacgaattaggcctagaagaattaggtgttaaattcgctgaccgtggattattagaagttgataaacaaagccgtacgtctatcagcaatatctatgcaattggtgatatcgttccaggtttaccacttgctcacaaagctagctatgaagctaaagttgctgctgaagcaattgatggtcaagctgctgaagttgattacattggtatgccagcagtatgctttactgaaccagaattagctacagttggttattcagaagcgcaagctaaagaagaaggtttagcaattaaagcttctaaattcccatatgcagcaaatggtcgtgcattatcattagatgatactaacggatttgttaaacttattacacttaaagaagatgatactttaatcggtgctcaagtagttggtactggtgcatcagatattatctctgaattaggtttagcaattgaagctggtatgaatgctgaagatatcgcattaacaatccatgcacatccaacattaggtgagatgactatggaagcagcagaaaaagctatcggatacccaatccatacaatgtaataactgattatctataaagattcagtcattaaaagctgtagcatatgctacggcttttttgttttaggtaaagtaatgtaaggaaattgatttgagatatcgttaacatgtgacatgcatgttatactagcgatgctaataaaagaattgaaatggagggttcaacaatggaatatgagtatccaattgatttagactggagtaatgaagagatgatttcagtgataaatttctttaatcatgtagagaagtattatgaatccggcgtgacggcaggcgactttatgggtgcatataaaagatttaaagaaattgtgcctgctaaagcagaggaaaaacaaatttttaatactttcgaaaaaagtagtggctataatagttacaaagcagttcaagatgtaaaaactcactctgaagaacaaagagtaacagctaaaaaataattcgttcgaaattaacacaatttaataggaatttttctttaaaactattgctaataaagctatattttgatacctttatcaagtgttaaacaaaatgtttgataaaagtaaacttaatatagcttttttaggtggaaaaataaatgaacataggtaataaaattaaaaatcttagaagaattaaaaatttaacgcaagaagaacttgctgaacgtacagacttatcgaaaggctacatttcacaaatagaaagtgaacatgcctcaccaagtatggaaactttcttaaatattatagaggtgttaggaacgacgccaagtgaattttttaaagacagtgaaaatgaaaaagtattatacaagaaggaagaacaagttatttatgatgagtatgatgaaggttatatattaaattggttagtttcaaagtcaaatgaatatgatatggagccattaatattaactttaaagcctggagcatcatataaaaattttaatccatcagagtctgatacgtttatttattgtatgtcaggtcagataacacttaatttaggcaaagagatatatcaagcacaagaagaagacgttttgtattttaaagcacgagataatcatcgtttgtcaaacgaatcaaacaatgaaacacgaatacttattgtagcgacagcttcatatttataggggggatcttatttggaaccgttattatcattaaaatcagttagtaaaagctatgatgatcttaatatcttagatgacatagatattgatattgaatcaggatacttttatacattattaggtccttcaggttgtggtaaaacaacaattttaaaattaattgcagggtttgaatatcctgacagtggtgaagtgatttatcaaaacaaaccaattggtaatttaccaccaaataaacgtaaagtgaatacagtctttcaagattatgcattatttccacacttaaacgtctatgataatatcgcttttggtttgaaattaaaaaaattatcaaaaaccgaaattgatcaaaaagtaactgaggcattaaaattagtaaaactttcaggttatgaaaaaagaaatattaatgaaatgagtggcggacaaaagcaacgtgttgcaattgcacgtgctatcgtaaatgaaccagaaatattattgttagatgaatctttatccgcattagatttgaaattgcgtactgaaatgcaatatgaattacgagaattgcaatctagattaggtattacatttatatttgtaacacatgatcaagaagaagcgttagcattaagtgactttctttttgtattaaaagatgggaaaattcaacaatttggcacaccaacagatatatatgacgaaccagtgaatcgatttgtagctgattttattggagaatctaatattgttgaagggcgcatggttagagattatgtcgtgaatatttatgggcaagatttcgaatgtgtcgatatgggtattcctgaaaataaaaaagtagaagtcgttattcgaccagaagatatatcattaatcaaagctgaagaaggattatttaaagcaactgttgattctatgttatttagaggggtccactatgaaatatgttgtatagacaataaaggttatgaatgggtaatacaaacgactaaaaaagctgaagtaggcagtgaagttggtctttattttgatcctgaagccattcatattatggttcctggagaaacagaagaagaatttgataaacgtattgaaagctatgaggaagtagacaatgcgtaatactaataaatttctcttaatcccgtatttactatggatggttatatttattattgtaccagttgtattactcatttatttttcatttttagatatcaatggacattttagtttcacgaattatcaacaaatttttactacaaaatatttgaaaatgtttgcatattcaattttatatgccgcttcaataacaattattaccttgactatcagttatccagctgcctattatattactcgttcgaaatttcaaaatatcttattaatgataatgattattccaacatggataaatttattgttaaagacatatgcttttataggtttattaagtcatgatggcgtgattaatcaatttttccacttatttaatttaccatcattcaatttgttatttacaactggtgcgtttttagtagtggcaagttacatttatataccatttatgattttacctatatttaatagcatgaaagcaattcctaataatttattgcaggcctcaagtgatttaggtgccagtcctttctatacttttagaaaagtaatcatgccgttaacaaaagaaggtgttatgactgggattcaagtaacctttattccatcactttcattatttatgattacaagattaattgcaggtaataaagtcataaatataggtacggcaatagaggaacaatttttaacaattcaaaattatggtatgggatcaactatagctatattcttaattgtatttatggcattcattttaatcattacaaaatcatctaatgggagagggtgaatcatatgaaatggtatggaaagctgtatatcgggatacttttagcgattttatacatcccaatattctttttaatgttctattcattcaattcggctggtaatatgattcactttgaacattttacattagagcattatcaatcattatttcaaaatgatcatttaatgtcggtcatttttaatacgatagctgtagcacttttagcagcctcaatttctacagttattggtacatttggtgccattgctatttattatttaagaaataaaaagtttaaagtaactttactaacattgaataatgtcttgatggtatcatccgacgttgtcataggtgcatcattcttaattatgtttacaacgattggccattttactggtcttggtttaggattttggacagttctaatatctcatattgcattttgcatacctatagttgtgattatcgtcttaccacaactgtatgaaatgaataataatatgttaaatgctgcaagagatttaggagcgactgaaccacaattattaagcaacattattattcctaatattttaccttctattataggaggattctttatggctttaacttattcactagacgatttcacagtaagtttcttcgttactggtaatggctttagtgtgttatcagttgaagtttatgctatggcgagaaaaggaattagtatggaaattaatgcgatttcaacattattgtttgctgttattgtattaggaatactaggatattatttgattcaatacgtgataaataagaaaaaactaatcaagcgaggtgtaaaataatgaaacgatttttacaactcattataggtgcattagttgtgggtatgctttgtcttactttaagtcattggtttaaatctaaagaacaagtgcatacaaatcaaaaaatttacgtatacaattggggcgaatatattgatccagagttaattaagaaatttgaaaaagaaactggcattcaagtcgtttatgaaactttcgattcaaatgaagcgatggaagccaaaattcgcaatggcggtacacattatgatgttgcttttcctagtgaatatacagttcaaaaattgaaaagagatcatttattgttaccaatagatcataataaggtacctaatattaaaaatttagattcagattatatgaatatgtcatttgatagaggcaataaatattctttaccttatttctttggaactgtaggtattttatataataaagaaaagtatccaaatgaatcatttgatagttggaagtcattgtataatcctaaatttaaaaaccaaattttactagttgacggtgctagagagattataggcatgagtttgaataaacttgggtataatcttaatgaccgtaattcgcaccatttaaaagaagcagagcgagatttaaccaaactagcaccacaagtaagaggtgtcgtaggtgatgaaattaccatgatgcttcaacaaaatgaaggtaacatagcggttgtttggagtggtgttgcagcacctctagtgcaagaaggggataaatataattatgttattcctaaagaaggatcgaatttatggttcgacaatatggtaattccaaaaacggcacaaaataaagagggtgcatataaatttatgaattttttattagatgctaaaaataacaagcaaaatacagaattcgtaggctatgcaacgccaaacaaggctgctcgacaattgttgcctaaagagattaaagacgaccatcgtttttatccgactaagaaagagcaagaacgccttgaagtttataaagatttaggacctgaagttttaagtgaatacaatgaaaactttttgaatttcaaaatgtcattaaaataaaatcataaatagtagttatttactgtatatttagttataataacgggataagtactataaggagttgtaacgaatgactggagaacaatttactcaaattaaacgtccagtaagtagattaactgaaaaagttctaggttggttatgttgggtgatgttattagtgcttactgtcattacgatgtttatagcacttgtttcattcagtaataacacatcgattgctaatcttgaaaatacattaaacaataatgcatttatccagcaattattagctggaaatggctataatacaacacaatttgtaatatggttacaaaatggtatatgggctattatcgtttactttattgtttgtttgttgatttcatttttagctctcatatctatgaatataagaatcttgtcaggtttcttattcttaatatcagcaattgtaacgattcctttagttttacttatcgttactttaatcattccgatattattctttattattgcgatgatgctatttataagaaaagataaagttgaaatggttgcgccacaatattatgaagagtataacggaccgatttatgattatcgtgaacctgtgtatgagcgcccccaaccgaaagatgattattatgatgtgcctaaatatgaaaaagaattggataaatcaaatactgtatatgatcaagaacaggaaagagataaatatgatcaatttcctaaacgtgcagttgaaagtgaatataatcatgatgagcgcactgaggaagaaccatcagtattatccagacaggctaaatacaaacaaaaaagtactgaagaactaggtattgaagatgatggttattatgcagaacctgaagttgatccaaaagaattgaaagcacaacaaaagcgagaaaaagctgaaattaaagctaagaaaaaagaaaaacgtaaagcttataaccaacgaatgaaagaacgtaggaaaaatcaacctagcgcagttagtcaacgtcgaatgaattttgaagagcgacgtcaaatttacaacaatgatatttctgaagaacgcaattcaagtgaagttaaggacaaaaaagagcaagaataaatattgatgatacccagattagtaagcagaggtcttttgcttattaatctgggtttttatatgaggttaattatcgataacgtttaattaaagtgtttaggtgtcataattttaaatgacgatttctcattactatacacctaaattatcatcaatctgaattcagatgtttattataaaaattagatgaaaaatatgttaatatacaagtaatttaatgtgcgtatatctataggctcgtagtatacttattaaaatattaaacaaagaaaggattttaagatgaatagaaaacctgaattaatcatggcttggattgcaaatagtattagtattatttatttattagttatggggctatcctatttttctttaaaaagtggtaatgcatcacaacgtgaagaattagcgaagcaattatctcagaacggtggcaaggtttctttagatatgcttcagacaacaatgggtgcattagcaattattttattaatttcaacactttatggtatatttgcgacaatttgtattaaaggacgtagaaaattatcgattatactttttgttatcgcgataattgtaagtttgatggctcttaatttaattgcaattgtcttatgggttatcgtgatgattatgttgatttctaaaaaagaatcaaaagaaacaacacataaggacgatgagtatatttatcattaatatgttcatagcaaaagaaaaaccattaaaatgttaagttgttaattattagatacaaccaacattttaatggttttatttttaactttgtagttcttggaatgtttgaacgattaaatagacatttaaaatacttagaataataataagtgtccatgaaatgatattaacccatgttttattatagaaaggtcccatcaagtctttattactagtagccaattgtaatggtattaaacagaatggcagagcaatacttaaaaatacttgagagaatacaagtagttgctcaattttagctgcattacctttaaaaatgattaagcatacgataacaggaatgacagcaagagaacgtgtaattaaacgtcttaaccaatttggtatgtgtaatcttaaaaatccttccattacaatttgtcctgctaaagtaccagtaatcgttgaattttgacctgacgctaataatgcaactgcaaataatgtactcatgattgcacccattgttgcacctagtacaggttcagtttttaaggcgtgatataaatcatagaaaccacctaaatcgtcagcatttgagttgaaaaatagtgatgctcctaacactaataataagcaattgactacaaatgcgattgataactgaatgttcgaatctatcgtagcaaatttaatcgcttgcgctttttcttcattgttatgtcttgagtatgttctagattgtacaattgatgaatgtaagtacaaattatgaggcataattgtagcgccaataatacctaatgcaatatagagaatgccgttatttgtaatgatttcactatgtggtataaatccatttaacacagcattcaactgtggtgatgaaatatagacttcaaatataaagatgaataacactgtgaaaattaatgtaccaacaatagcttcaatttttctaaaaccatatttcattataaaaagtagtaaaaatacatcaagtacagttattagtgcaccgacgattaaaggtatgttaaataggagattaagagcaatagcactaccaataacctcagcaatatctgtagcgataattgctagttctgcaatgatccaaaagattatagcaataggtcttgataaataatgtcgtgtcatttgagctaagtccatacctgttgctattcctaatctcactgtcatgctttgaagtaacattgctgataaacttgaaataagaattacgaatagcaaagtatagccatattgggcgccaccttgcattgatgttatccagtttccgggatccatgtaaccaacagcgactaataacccaggtccaagaaatgataaaaatttctgtttatttgaactgcgatgatcgaatttaattgtattgtttatttcgtctaaacttaattgttcatttgttgaatgtcgtttattattcattttgactcacctctacttcttatggacaatataataacctaataaaatgtttaggccaacctaaatttattttaatttttttaaaagtatgaattattatgttgaacgttcgatttaatattaagaaaaaagagcacgaaatcatggatgtgattaagtgctctattatttaaacaaagttatttatgcagaataaaatggtaagaactgatcgaaggtttcttctaaaaatgcaataaatgctttgtcactttttaatcttttatcttgtggtgtgattgcacgcgctataaagaattcaccttttttcacattgatggctctttgtatcgcttctattaaatcatcatccgttaaatctttaataaatggtttatcaggtttcatatgatctaagcaaacacgataatcatcaggtaattgttgaatagctttaaattttctttcaaaaacttttgcacgtgttgctttatcttttgcttcatgcatgattccaaacataacaaacagttgatcttcaaacataccaatttggaaatgaggtaacattttatagcctcttttgtttgttgcaaaagcaacccatgtatctttaggaggattcacacttcttctagcatgctttgctacgtgaggataaaatgtttcaccagtttgacttgtaaagaagtcactaaaatattctcctaattcacggagttgtggtcgtatgtattcgtttaaagcttccattcgtgcgtctaagccttctacgttgaacgctttgaaatctttaggtttaaatgtatattttgtcatagagtacctcctgtatagtgtttaaaaatattgtagcatatgttttatcaattgcggcttaagacgctctcattaaaattagtattttcatttttatcataagaagttatttttataaaatgttgatgtataataaagatgttaggagatgatgttatggcactttatggatttgcccaaggacttattcaagaagcaggaattagaattaaacaattgatggagcaaaatttaacaattgaaacaaagtcaaatccgaatgaccttgttacaaatgtagataaagcaacagaagatttcatttttgatacaattttagaaacatatcccaatcatcaagtattaggtgaagaagggcatggtcatgacatcgatacttccaaaggtacggtatggattgttgacccaatagacggtacattgaattttgttcatcaacaagaaaatttcgcaatttcaattggtatttatatcgatggtaaaccttatgcaggttttgtatatgatgttatggctgatgtcttatatcatgctaaagtaggggaaggtgcatatcgtggtagccaacccttgaaaccattgaatgattctaatctaagacaaagcattattgggatcaatccgaactggttaactaaaccaattttaggagaaatctttaaagaaattgttaatgattctagaagtgcaagggcatatggtagtgcagcgcttgaaatcgtttcagttgctacaggtaatttagaagcatatatgacgccaagacttcaaccatgggattttgctggcggattggttattttatatgaagtaaatggacaagcttccaatttactaggagaaccattaacaattagtggtccaaattcaatcttagttggaaatcgtggtctccatcaagaaattagcaatgattatttagagccccaccatgatgcgttaatacaattacatgaacaacgatttaaaagaaaatcaaaataattaccaaaagcgtaatatgtagtcctaacaattaggtaacatattacgcttttataccttaaataataaaaacacgcgccaatataaaaccagttaaatgttcatcatgaacatgtgtggtcttaaatcaacgcgtgttattgtcgatataacttatagccaatcgttttctcgatattttttctttgtagtaaatccaattccaaaggttgcaacgagtaatataaatgttaaaatcatcattggtacatttgatgcaccaacagcaaaactaaataatactaagaaaacaacagctaatatagaaaatacccaaaagatatttttagattttttttgtttcatcctatccccaccttttgcttatcttttctcaattatatgatataataaaaaagttgtaattaaaagtgggattttacttaagaaagaaggaaactatttatatgactaataaaagagaagatgtccgcaatatagcaattattgctcacgttgaccatggtaaaacaactttagtagatgagttgttaaaacaatctggtatattcagagaaaatgaacatgtcgatgaacgtgcaatggactctaacgatatcgaaagagagcgtggaattacgattctagccaaaaatacggctgttgattataaaggtacacgtattaatattttggatacaccaggacatgcagactttggtggagaagtagaacgtattatgaaaatggttgatggggttgtcttagtagtagatgcgtatgaaggtacaatgcctcaaacacgttttgtacttaaaaaagcgctagaacaaaacctgaaacctgttgttgttgttaataaaattgataaaccatcagcacgtccagagggtgttgtagatgaagttttagatttatttattgaattagaagcaaacgatgaacaattagaattccctgttgtttatgcttcagcagtaaatggtacagctagcttagatcctgaaaagcaagatgataatttacaatcattatatgaaacaattattgattatgtaccagctccaattgataacagtgatgagccattacaattccaagtagcattgttggactacaatgattatgttggacgtattggtattggtcgtgtattcagaggtaaaatgcgtgtcggagataatgtatcactaattaaattagacggtacagtgaaaaacttccgtgtaactaaaatctttggttactttggattaaaacgtttagaaattgaagaagcacaagctggagatttaattgctgtttcaggtatggaagacattaatgttggtgaaactgtaacaccacatgaccatcaagaagcattgccagttctacgtattgatgagcctactcttgaaatgacatttaaagttaacaattctccatttgctggccgtgaaggtgactttgtaacagcacgtcaaattcaagaacgtttaaatcaacaattagaaacagatgtatctttgaaagtttctaacacagattctccagatacatgggtagttgctggtcgcggtgaattgcatttatcaatccttattgaaaatatgcgtcgtgaaggttatgaattacaagtttcaaaaccacaagtaattattaaagaaatagatggtgtaatgtgtgaaccatttgaacgtgtgcaatgtgaagtgccacaagaaaatgcaggtgctgttattgaatcattaggtgcacgtaaaggtgaaatggttgatatgactacaactgataatggacttacacgtttaatctttaatgtaccggctcgtggtatgattggttatacgactgaatttatgtcaatgacaagaggttacggtattattaaccatacatttgaagaatttagaccacgtattaaagcacaaattggcggtcgtcgtaatggtgcattaatttcaatggatcaaggttctgcaagtacttatgccattttgggacttgaagatagaggtgtaaacttcatggaacctggtactgaagtttatgaaggtatgattgttggtgaacataatcgtgaaaatgatttaactgttaacatcactaaaacaaaacatcaaactaacgtacgttctgcaacgaaagaccaaacacaaacaatgaatagaccgcgtattctaacattggaagaagcgttacaattcattaatgatgatgaacttgttgaggttacaccagaaagtatacgtttaagaaagaaaattttaaacaaaaatgttcgtgaaaaagaagcaaagcgtatcaaacaaatgatgcaagaaaacgaataatttaacataataaaagagaagctgagcgatgaaagttgcttagcttctcttttggcatataatatttgaaaaagtgtttaaatgctattatttcctgttactttcacattttcaaatttctaacttgtttattcagatattaatcgagcggatagtgttgcgcacgttgtttaggtgtgtctaatcgacttttacaatcatcacacataaatgttcgaataggattgtttttaagtcgtttagactcagttgtgcgctcatctataaatacttttgcatcacagataatgcattgcacttgtctcaaattaaatcacctcaatatgagttacatggttgattcgatatgaataaccatcttcttgattgtaaataaaactatctacaccattatcgctgtaaagtcgtttaccgtcttttgcaaattggaaaaataaatagggtaatagatctatcggtatatctaaatgatcatgctcatttgataatcgaatagtagttgcagagtcatgtggttcggaatgtttgaaaaatggtgtcatattaatgacaaatgaaccttctaacatggcacgttttttatattttatttctgaatttaaagtaggcggattagtttgtccttctaggatagcacgattccattcatgattatcttcaaagtcgattggttttgaaccatcaaatacacctttttctaaatcttcgatgctaacttttctatcatcgaaaatccaagtcgtactatctaatgttataggaaactttacggctcctttaatttgtatcattttcccactccctatcaatgtatatagcattattttaacacaaattgctaacgacacattttaaatctacttgctttttaatatttagtaagataaacttttagtaagacttgagaatttatatagagggggagcgtgtcatggcgaaacaagcaacaatgaaaaatgcagctttgaaacaattgactaaagatgctgatgaaatcttgcatctgattaaagttcaactagataatttaacattaccttcatgcccattatatgaagaagtactagatacacaaatgtttggacttcaaaaagaagttgattttgctgttaaattaggtttagttgaccgcgaagatggcaaacaaattatgttacgtcttgagaaagaactttcaaaattacatgaagcttttacacttgtttaaggtttaatatataagcatattaaaatggcgtgagatatcgacaattgagctgcgccgattttatatttatagtttaattactgattaaagtggctgttatgttgtcttcttgatgacatgtcagtcacttttattgggttttagcaattcacgatattaagtaaacaaatattctataaattacctcaagagacctgttaatatttgtgattatgactgtgtcatgtatataataagtaacatggatttttaaaattaaagtataaaacgaaatcatttgaagtataaattgtagaattggatgactgaatatatgaagaattttagaagtattttacggtatattggtaaaacctcaaagtttattgattatccgttattagttacatatattgtattgagtttaattggattagtgatggtatatagtgcaagtatggttccagcaactaaaggcacattgactggtggtatcgatgttccaggaacgtatttttacaaccgacaattagcatatgtcataatgagttttataattgtattttttattgcatttttaatgaatgttaaattactgagtaatattaaagtgcaaaaaggtatgattataactatcgtctcactattattactgacgttagtaataggtaaagatattaatggttctaaaagttggataaacttaggatttatgaacttacaggcatctgagttattaaaaattgcaatcatattatatatcccatttatgatcagtaaaaaaatgcctagagtattaagtaaaccaaaattaattttaagtcctattgtattagcattaggttgtacgtttttagttttcctacaaaaagacgtagggcaaacattactaatattaattattttagttgcgatcattttttattcaggaattggggtaaacaaagtcctaagatttggtataccagcagtgctaggattcttagtagtatttgtcattgcattaatggctggttggttaccaagttatttaactgccagatttagtacgctaacagatccattccaattcgaatcaggaactggataccatatttccaattcattgcttgcgataggtaacggtggcgtatttggaaaaggattaggaaatagtgcaatgaaattgggctatttaccagaaccacatacagattttatttttgcaattatttgcgaagaattaggtttaatcggaggattgctagttattactttagagttctttattgtatatcgtgccttccagtttgcaaataaaacatcatcatatttttataaacttgtgtgtgttgggattgccacatactttggaagtcaaacgtttgtaaacattggcggtatttcggcaacaattccattaactggtgtgccattgccatttatcagctttggtggatcatcaatgattagtttaagtattgctatgggtttacttctgattgtaggtaaacaaatcaaagtagaccagcaacgaaagaaacaacaacaaaaagttgatataagaagacaatttaattaaaaaaatactagccaatatttagtacgagatgacttctgtcattaagcaatgctaaacattggctatttatatactctttgtcaaattggactgatgagttcaataacggaagttaggcaaccaaacaacgcttaacttcctttttgttttgatattacgagattactcatgattatcaaattttataaacaaaacaacgtataattataactaaattttatgactaaaaattactaaatgtggtggcgaaattagaatcatgatgataagataaagttatcgctattgataataaatgttgatgttttgcaattttatttttaattttttagagttgtagaaatcgaaaatgtttcacaacaaaaacgtgaactacctgttgttgcatagtcatttttgaaattattatttctgaagcggaggttttaattgtctcaagaatgttaaattttgaaaatttgaaacataactatagcaaaacagagcgctttaagataaaattttattatctaattagttagaaaattctaatagtttgaggagtgtatcgctattgaaacaaataaaaaagttacttgttgctaaccgtggagaaattgcaattcgtatattcagagcggcggcagaattagacatcagcacagttgcaatttattcgaatgaagacaaaagttcattacatagatataaagcagatgaatcctatttagttggaagtgatttaggtcctgctgaaagttatttaaatattgagcgtatcattgatgtagcaaaacaagcgaatgtggatgcgattcatcctggctatggatttttaagtgaaaatgaacaatttgcgcgtcgttgtgcagaagaaggaattaaatttattggtcctcatttagaacatttagatatgtttggagataaagttaaagctcgtacaacggctatcaaggcagatttaccagttattcctggtacagacggtccaattaaatcatatgaattagcaaaagaatttgcagaagaagctggtttcccgctaatgattaaagccacaagtggtggcggcggtaaaggtatgagaatcgttcgtgaagaaagtgaattagaagatgctttccatagagcaaaatcagaagctgaaaaatcatttggtaatagtgaagtttacatagaaagatacattgataatccaaagcatattgaagtacaagtcataggtgacgaacatggaaatatcgtacacttatttgaacgtgattgttcagtacaacgtcgtcatcaaaaagttgtagaagttgcaccatcagttggattatcatcaacattacgtcaacgtatttgtgatgctgcaattcaattgatggaaaatattaaatatgtcaatgcaggtactgttgaatttctagtatctggtgacgaattcttctttatagaagttaaccctcgtgtacaagtagagcatacaattacagagatggtaacaggaattgatattgttaagacacaaattttagttgcagcaggtgccgatttatttggtgaagagattaatatgccgcaacaaaaagatattacaacattaggctatgccatccaatgtcgtattacaacagaagatccgttaaatgatttcatgccggatactggaacaatcattgcttatcgttcaagcgggggctttggtgtacgtcttgatgctggagatggtttccaaggtgctgagatatcaccttattatgattcattactcgtaaaattatctacacacgcgatatcatttaaacaagcagaagaaaaaatggtacgctcattacgagaaatgcgtattcgtggtgttaaaactaatattccattcttaattaatgtaatgaagaataaaaagttcacaagtggtgattacacaactaaatttattgaagaaacaccagaacttttcgacattcagccgtctctagatagaggtactaaaacattagaatatataggtaatgtaacaattaatggtttcccaaatgttgagaaacgtccgaaaccagactatgaattagcatcaattccaactgtatcttcaagtaaaatcgcttcatttagtggtacgaaacaattgcttgatgaagtaggtccaaaaggtgtagctgaatgggttaaaaagcaggatgatgtcttactaacagatacaacctttagagatgcacaccaatcattattagctacacgagttagaactaaggatatgattaatatcgcatccaaaacagcggacgtatttaaagatggtttctcactagaaatgtggggcggtgctacatttgatgtggcatataatttcttgaaggaaaacccatgggaacgacttgaacgtctacgtaaagctattccaaatgtattattccaaatgttgttacgtgcttcaaacgcagttggttataaaaactatcctgataatgttattcataaattcgtacaagaaagtgctaaagcaggcatagatgtctttagaattttcgattcattaaactgggtagatcaaatgaaagttgccaatgaagcagtacaagaagcgggcaaaatctcagaaggtactatttgttatacaggtgacattttaaatcctgagcgatcaaacatttatactttagagtattatgtcaaactagctaaagagttagaacgtgaaggtttccatattttagcgattaaagatatggcaggcttattaaaacctaaagccgcttacgaattgattggtgagttaaaatcagctgtagatttaccaattcatcttcacactcatgatacaagtggtaatggtttattaacatacaaacaagcaatagatgctggtgtcgatatcattgatactgctgttgcttcaatgagtggtttaacaagtcagccaagcgccaattcgttatattatgcattaaatggcttcccacgccaccttagaactgatattgaaggtatggagtcacttagtcattattggtcaactgtacgtacttattattcagactttgaaagtgatatcaaatcaccgaatactgaaatttatcaacatgaaatgcctggtggacagtattcgaatttaagtcaacaagctaaaagtttaggtttaggcgaaagatttgatgaagtcaaagatatgtatcgcagagtgaatttcttatttggtgatatcgtaaaagtaacaccatcgtctaaagtagttggtgatatggcactttatatggtacaaaatgatcttgatgaacaatccgtgattacagatggctataaattagatttcccagaatcagtagtgtcgttcttcaaaggtgaaataggacaacctgtaaatggttttaataaagatttacaagcggttattttaaaaggccaagaagcactaacagctcgtccaggtgaatatctagagccagttgattttgaaaaagtccgtgagttgcttgaagaagagcaacaaggtcctgttacggagcaagatattattagttatgtactatatccaaaagtatatgaacaatatattcaaactagaaatcaatacggaaacttatcgttacttgatacgcctacattcttctttggaatgcgtaatggtgaaacagtagaaatcgaaatcgataaaggtaaacgattaattattaaactagaaacgattagtgaaccagatgaaaatggtaatagaacgatttactatgcgatgaatggtcaagcgagacgtatttacattaaagatgaaaatgtgcatacaaatgcgaacgttaagccaaaagcagataagagtaatccaagtcatatcggtgctcaaatgccaggttcagtaactgaagtcaaggttagtgtaggtgaaactgtgaaagctaatcagccgttgctaattactgaagctatgaaaatggaaacaacaattcaagcaccatttgacggtgtgattaaacaagtaactgtaaataatggtgacacaatagcgacaggcgatttattaatcgaaattgaaaaagcaactgactaaaatgattaaaataaaacgagattacacaacaattgacgtgtaatctcgtttttacatggcttaggtttaattttaaatattgatataaaaaaccgtaattttaatgggcgtgccattaaaattacggtttgcttttttgttattgcttgtcacttcttactgatcgtaacattagcatgataaagtatgttgtcataccaaataaataagtgataaataatgcatggaaaagtgcgattatcaggttaacatttgtcataatagataatgcacctgtgataacttgtaatataacaagtataaatgcagctgtataaccataatgaacagtacggttatttggataatttttaacagcgtgaatataagtaatcataataatcgtaaacactataaaagccatgatacgatgcgtgagttgaacccaatcttgttctgaatgtggtacaagatcgtggaatggcaatggccaaccaccatatgctaaacttgcatccgcatgtctcactagtgcaccagtataaacaccacaataaatgatgattgccattaaccatgttaaacgtcttaatggctttttgatatataattcgtcagcttcatatttttgatctatagagaaaataatcaatgttattaaaaatacagatgagaaactgattaatgatataccaaagtgcaatgctaaaacgtaatcgttttgttgccaaataacagcagcagctccgattaatgcttgcaataataagaatccaacactaatgattgataaaggtttaatttctttaatatagcctatatgtttccatgcagtgataactaaccataagaccattaataaagacaaagctgaaacggctctatgacttaactcaataatcgtatcaataggaaagaattctggaatcaacgcaccatgacatagtggccaagaagaaccacaaccatcagctgatccggttttggtaactaaggctccaccaagttgtacaaatgtcatcattaacgttgctacgacacctaaccattttaaattctttttgccaaacaatttatacaccccatcataaaaaaacgcatcactgagaattagaattaatagccggatttgagatgatactataaatagacctgattgtaggatatgaaaagatgggatccaacgcaggaaatatgatttaattttacaagtattgtatgtggacgacataaaaagaacttaatcgtaatgatttttttattgggataattatgtaatccacgtttactcaaatttgaagcttaaatattaatctcttttagatgcatgattctacttattaaaattttctaacatatacattatagcaataaattaaatgttatttgtgtcacaaaattgacattttctcttgtcgttaatttgtcacaatttaattttattaaacctagtctttttatgcaatctaagatatcataatcttatatgaacaaatttaaggagggggattatgagcaaagagcatactttgtcacaaaatattagcagagttaacttcaaagaattgcaacagataattaaaatgggacttgttcaaggtaacttaattccggcttttgcgggcgcatggctagcagttgtaatgacaaatcattccttcttatcatcaatacctcaaattttattaatgctatttggatctactttaattatgggtggcgcatgtgcgttaaataattattacgaccaagatattgatcgtattatgcctagtaaacaaaatagaccaactgtaaataatagaattacagatcaaaatttattactattaagttttggtatgatgttagttggagaaatttgtttgtttttattgaatataccatcaggcgtacttggtcttatggggattgtaggttatgtgtcttattactcaatatggtctaaaagacatacaacatggaacacagtgattgggagttttcctggagcagtaccaccactaattggatgggttgcaattgaaggacaaattagtttaacagcgattgcgctgtttttagttgtattttgttggcaaccaattcatttttatgccttagctattaaacgtaaagatgaatatgcacttgcaaatattccaatgttaccatcagttaagggctttaaacgtacacgtgtcagtatgtttatctggttgattattttattgccagtacctttattactaataaatttaggtgtcgtattcgtagtgttagctaccttattaaatttaggatggattgcattaggtttaacaacatttaagaaaaattcagatcaaacaaaatgggcaacacaaatgtttatatattcactaaattatttagtgatctttttcgtgttagctgtgattgtttcattacttactttgatctagattaattaagttaggatgaaaaatatgggcgttccaattttaccaacgattagtacgacatgtattgtcattagtgcaattttaattgccattggttggagacttatttggaaaagggaaataaataaacacaaaaatgttatgttagctgcagctgtttttgctttaacttttttcttaatctatgcaagtagaacgatttttatcggtaatacagcatttggcggaccagcatcaattaagaaatattatacgattttcttatttttccacattaatttagcaacaattggtggtattctaggcctagttcaaattattactgcatttaaagataaatataatgtacaccgcaaattcgggccattcgcttcagttatatggttctgtactgcaattacaggtgtagcagtttacttattattatatgtattatatccaggtggagaaacgacatcactgattaaagcaacatttggtcattaatatgcttatacaaatgatactaatctgataaggcaatttgttttatcaggttttttgatgaagaatagtcggacagttgatggtattcatttgataccttaactgtccatttttttatacatattttaatcttaataatgaaattcaacctgaaaacataaagataggttatgatatagagtgtagggaaaatctttatgacgttaaaattatgcctgaagatgattttgttttatcgaaacgacacagttatgtcagtgttgaaaatttgctaattaatgtgttgttttttacaatagtattaatactttttaggtggttgattgatgaaaaagttaattataagagtcgtcggtgtattatttttagttggatttttaatatatcttttttattcaccgagattaaaatttgatgtattagagaacccgaataaaggtaataaagtaaatagatctgaacaggtgaataaatcaaataaccatgctgaaaatccaaagcctaaagaaggtgttggtacatgggtaggtaaagatattaaagtgcttacttctaaatttggacaagcagatcgtgtctacccttttagagatggttacaaaaattatgtgtttaaagacaaaaacagttattacattgtttcaactaaacgtgaagaaatcgtttcagtgtatgctacaggtgagaaagtcaatgttagtccgttaaaaataggacaacattctgcagaaatttttaatcatacaagtattaatccagaaccgtcctttaaagttgatggtaaaaaatatgaatttgaactttcagatgaagatttaaaaacacaaacactgattaaatatggcgacatatatgcacaagtgtattctgatcaacaatcgaaaaaggtgctaagtgtacgatttttaacaaaagaaatgttagcagatattgaaccttatcaattaaattctaattctacgtcagaagagcataataagcgtccagttgagcaaaatccaaatcaattaatttctctttatgaagtaacgaatgaaatgagaaaattaaaaggattaaaaccattgaaaatcaatagcgatttagcacatattgcatctaataacttatatgaagcgacctctaatggttctgatagtgttgaatttacagaggacgcattaagagggcaattagataaaaatcacgttacttataaaacaactgctcaaaatgttggttatgcgtttaatgatgtaccaacattaatccatagttggatgaattcagatatacatcgatctcgtctattaaattcaaaatacgatgagatgggtggagatgtaatgagagattattattcactaattttcttagaaaaataacaatgaggggtatttatgattaatgaagcttcactagcgatattagatgatattgatgaactagctgatatgatagttgcatcagatatttatgcatcatttgagcaagctaaacaggcgctcgaaaacaatgacgaagcacatttactttatcaatcatttttaaaatcaaaagagaaatatgatgaagtaatgcgattcgggaaatatcatcctgattataagaaagttatgttagagacaagacaacgcaaaagagcatatgagatgcttgacgttgtgatgcattacaaagctagggaaatggcacttcaacatttaatagatgaagttgttacgaaaattgcgtacgctgtttcagaacatgtcaaaatagaaacaggtaatccattctttcaaacatcacatagtggttgtgcgacgggcggatcctgtaattgttcattataaaaaacatcgagtcagaaaaaggtggttattgaaaccactaactagcatctgactcgatgtttttatttattcgggattgtttgtttgaattgttgtgctaaatctggtcgatctgtcacaatcgtgtgtgcacctttttggtataaatcattcatcagatttatactatttacgccataatagcctggaatgatattcatatcatttaaccatttgataaaacgagatgaagtcaaatcaatgcctttaaaatgagtaggcatttggaacgtttgtgctaatggttggtagtacctaccacctaataaatgatattttaaaaatgcttctgtaacttcctgttggctagcaccaattgcgacggatccttgtgcaattttattaaaacgaacgatttgttctttataaaaacttgtcacaagaacgcggtcaaatgcttgattttctgcaattgtatcaaacataatttgtggtgcgattgagccttcataggattcaggagcatcttttaagtctacgtttatatacatatcaggatattgcttcagcaactcatcgaaggttagtatagctgtgtgtgcatgaccacgatatggtgttagtccattgatatctttgaagtgataagctgcgtctaatttctttaattctgctaatgtatgggcactaacttttccagagccgttcgtcgttctatcaacagttgcgtcatgaaaaacgataagctgttgatcttttgtgagtctcacatctgtttcaaagccatcaacgcctaattgtttagcatagtcaaatgcaagttgcgtttgctctggtcttaaagccataccaccgcgatgcgcaaatatatatggtgcattgcctttgaaaaaagcagggatggtttgctttttagtaatcactttatttttattgatcattaatagactacttaaaaatccagcaccgactagtaccgcatttaaaatgtttctgtttacttttttcataaaaaattcctcctcgtttacttttatagcttaacaaattcatagttctgactacagcgaaatgtgtggttaatcatatagtgatgctcttgagaattgaattaatataatgatgtttaatataatctaaatacatttatcgagcaattacataagacataattaaggtagcttaatattttaaaattaataaagacatgatatgattaatgctgaaaataaatggagtgaggtttaaatgaatttaatcccaagaactagtattgtagtttatttaaaacatatgaaacatgaacgacaaatccgaaaatatggacatatcgttcattcaaatagagatcgtaaatttgtaattatgtatgtgaatgagcaagatgttgatcaaattgtacataaactaatgcaacttaaatacgttagacacattgatggctcaccatataaatacttaaagaaaacttacgaaaaagagaaacacgaaatatataattaatattattgaagttctggtatccatttttggagccttaacacactaattaaataattataatataacgataaatcatgaaatgcttgagggggctgtacatcgatacctaaaattggtatgtcgaatttttcagcacaatcatttatcatttgaaactttttatttgaatctggatatggatatttaatagcgtttatcatgatataaaatgcttggaaatgattgccagttgtagggttcataatgattgctacagatgactttttattttcagcttgtggtgaatgaaaatagataattttatcaatacgttgatggttatattcaatcatcgtcatgaattcgaacaaatctgttagaccttcaccaagtgtaataaatgtttgtttcattggtttatcattctcctttttctcaataaattatattaaataactaaatgaattggaagtgtgaacaacatgcgcgtcattgcaggtaaacataaaagtaaagctttagaaagtatggaaggccgtaatacgagaccaactatggataaagttaaagaaggtatctttaatagtttatatgatgtgtcaggtataggtttagatttatttgcaggaagcggggcgcttggaatagaagcactctctcgaggtatggataaggtaatctttgttgatcaaaattttaaagctgtaaaagttattaaatcaaatcttgcgaatttggatttagaggcacaatctgaagtttataaaaataatgcagatagagctttaaaagcattgtcaaaacgtgatattcaatttgatgtcattttcttagatccaccttataataaaggtctcattgataaagctttaaaactaatttcagagtttaatttattgaaagaaaatggtatcatcgtttgtgaatttagcaatcatgaagaaatagattatcaaccgtttaatatgattaaacgttaccattatgggttgacagacacattgttattagaaaagggagaatagcatggaacatacaatagcggtcattccgggtagttttgaccccattacttatggtcatttagacattattgagagaagtacagatagatttgatgaaattcatgtctgtgttcttaaaaatagtaaaaaagaaggtacgtttagtttagaagagcgtatggatttaattgaacaatctgttaaacatttacctaatgtcaaggttcatcaatttagtggtttactagtcgattattgtgaacaagtaggagctaaaacaatcatacgtggtttaagagcagtcagtgattttgaatatgaattacgcttaacttcaatgaataaaaagttgaacaatgaaattgaaacgttatatatgatgtctagtactaattattcatttataagttcaagtattgttaaagaagttgcagcttatcgagcagatatttctgaattcgttccaccttatgttgaaaaggcattgaagaagaaatttaagtaataaaaataacagtattttaggtttatcatggtttacaatcctaaaatactgttttcatttgttaacgatattgctgtatgacaggcgtgttgaaatctgtttgttgttgcccgcttattgcattgtatatgtgtgttgctttgatttcatttgtgaagtaatgtgcattgcttttgttaatattggttatatattgtctttctgggaacgctgtttttaaatgctttaaatattgtctgccacggtcgttcatcgctaatactttaactgcgtgaatgttactcgtaacatctgtaggtttaatgtttaataatacattcattaacagtctttggatatgcgtatatgtataacgctttgtttttagtaattttacaaaatgatgaaaatcagttgcttcataaatgttagatttcaaacgattttcaaaaccttcagtaacagtataaatattttttaatgaatctgtagtcatagctatgatttgatatttcaaatatggaaatatttgatttaatgttatatgaggtgttacgtacaagtgttgaatatctttaggtaccacatgatgccaatgatcatcttgactaatgattgatgttctaatagatgtaccacttgcaaactgatggtgttgaattaatgaatcatgatgttgagcattttctcgtttgatagaaattgcattgatgtttttagcatttttagcaattgctttcaggtaactaataccaagtatgttgttaggacttgctagtgcttcatgatgctctaataattcgctaatgatacgagggtagcttttaccttcttttactttttgtgaaaaggattcagattgttcaatttcattaatgctgtgtgctaattgctttaatgttttgatatcattattttcactaccaaatgcaattgtatcgacactcatataatctgcgactttaactgctagttcggcaaaatgatcgccagatgataaactggcagttgctggtagttcgataactaaatcagctgttgataatgccatttttgcacgagtaaacttattatagattgctggttcgccacgcatgacaaagttaccactcattattgcaatagtaacgtcagcatttgtaagttttttagattgattaatatgatattgatgcccattatgaaagggattatattctgtgattaagccaacgcttttcatttgcaattcgtcctttcggtattcattattaatattgtaacagaacatgatatgttaagaaaaaatcttgacaacttgttcttagaaagttaaaataaattttgtgcttgttagaggtgaagccatatgaaatggtcaattacgcaattaaggaaatatcaaggtaagccatttgaatttgatcaaacggtgagttttgacaatttaaaagaatcattagatttaattgatttatctccaattacaatccaaggtcagttaaccattaagtcaacagaagtcgttgcggatattcacattactggaacgtatacaatgccttgtgcacgtactcttgtaccagtaaaagtcccactagatgtaactactacagaagtatttgatttagaagggtacaatcagtataacgatgatcaagatgatgtagatgaacactatcacattattaaagatggtatggttaatcttcaggatattgtcgaggatatagttattattgagaaaccaatgagagcttattcagagcaaagtgaccaaatgttgacagtaggtaatggttgggaagtaatcgatgaggatcaattagatgagcttgctaaacagcaagaacaagatgattcagaatcacgacaagttgatccaaggcttcaaaaattacaacaattatatgataaagagcaataagtagtttaattaatgatataatgttgttaattaaactaacatttagtatttttcgtttataatctaaggaggatatatcatggcagtaccaaaaagaagaacttctaaaactagaaaaaacaaacgtcgtacgcatttcaaaatttcagtaccaggtatgactgaatgcccaaactgtggtcgaatacaaattatcacaccgtgtatgtaaaaactgtggttcttacaatggcgaagaagtagcagctaaataattttagttactcaatataaaaagtcccgcttaaaatgattgttttaagtgggactttttatattgcgaaaaataattggcgaacgaggtaactggatacctcatccgccaattaaaatttgttaatttaataattaaatataaagacgatttattagtttttacgttttctaggtaatacgaatgcaacgatgctacttaaagctaataatgccattaatggtaatgtcatatctttatttgattcttcaccagtttgtggtaatgattttgctttattttcttgtgtatttttattgttttggctttgagtgtgtccatcatttgtgtttttaatgtttgctttttgtaatggagcactatcttttgcttcgctagaacctgctgaagtttgaacaacatcttttgttgtttttgatgaagcagttgttggttttgcaacattttgagtcgtagatactaccttagttggagttgtactacttgattctacttcacctttagttggttttgtagcaggcgttttgtctttacctgactcactagatgcgtcattttctttttcaacacttggtaattgtttattgtcatctttttggctgtcttgtttttgtgattctttttcaacaggtgatggtgttggtttgctaggcgtagctggagtagcttccttcttagctgagttatcttgttgttcttttttgttagatttatcggtattggcttttgtaaatgcttctttatcaacgattctgacatggtattgtccatcataatcaatcgtttttacgtgaactttaacgatagcatcatatagagttttaccttcaacatatgggaaaataattgttctagtattatttttagcatctttgcttatagttctaacacgttgaccttcaaccatgaaatctttccagtaatcgtcattagtagtttccatgaccatatattttttgccgttaagcatacctgttttaatagggtgtttaacaaaagtatccatcatagattcgttattctcaacactttcataaacaacatattttgtatcttgtaaatcagtcattttttcatttgttggttgtacattttggaattcagtaatagctgatttcacttgctcatctaaagctttctttgtatcctctaatttcttcttgtactcagcctttaatttttcaggaagtttatcttgaattttatttaattcataaacttgtctttctagtgttttcgcttttttatatggcgctaataatttttcagctttataatcttcttcagttttgaatttatctgcactgttataaattggttgtgcgaattccattaatgtgtaatcgtatttttcttctttgttattgaagtgtgttgaactaacaattttaacagcttttgttccgtttgatacagagaagcgaatgtaagcataatctttaacagtatcgtatgatactaatttaattggcaactttttgtcaccttcataaacttcaaattttctccaaaattgacctgattgtaatcctaattcaatttctggttttgaatcagtgaaaataactctagcaggtttaacagaacttgcataatgataaaactgttgagttccatctttctttttcatttcaaaatcaattggacgagagtttggtgcgctatgatctttgtcttttattgcagggtttttaatcgcttctctaagttcctgattcaaaataggatatgtattgttagtggcttttgctgctggtttaacttcttttgtttccttaggggctttaacttctttaacttctttagcttcttttgtttcagaagtaggggcctcaacttctttattagatactgagacagcattagctactggtttagtttctggagctttttcagatgttgttgttggacttgcaactgcttcagtttttggttgtgcttctgtatttgtaccacctgtttcttcagctgctgcttgtgcttcgccatttgacattaataataaaagtgtactaattgctacagatgcaacgcctagtgatgactttctaattgaataaaatgatttaaattctttttgctgtttgttcatgttgtagaaacaactcctaattgtatattatcaactgataatcattatcaattgattacttgtattgtacattgaaatgttagttaattgcaacgttattttataaaaaaaataacctatgttatagattatgaaatatctatgacataggttaaataaaatttaaaataaaaaatatattaagttatgagtgtgacgatgatttatttagattcttttcttttgaaaagtaataaagataatgaacctaaaagggcaagtgttgcgaaggcaactgtgctaataaagttatcaactgaagttaaaccagtttttggtaattctttagctttagatgcttgtttaggcgtttcgttatgttttgtaactttgttagtttgttgtgatttattatcacttacagcttgattgttgctttcagatttcgctgttgcaacatctttaacaggtgtttgaactttattttgttcttgagcagtttgtgctgttttaactgtatgagcagtttgtgttttagtttgatcttttgttgtgtcagtacttacaactttagtagagtgattgtcttcaactttgcttgttgtagttacagtaggtttaactttttcaactttaggttgaactggtttagtttgctcagtaggtgttttaggttgagctggttttggttgaaccggtttaacattgtttggttttgctgcgtcagctaatgtaggaattgctttttcaaattccaaatgcgtagtatatctatgattgtaattaatttgtggcacgacaatatgtactttagtagttaagctcttatatccaggttcaactgcaacattgattgttctagtatccgcttttttattatcgttaacaacagttgttgctaattcttgattgtttgcattgtaaaatttgtattctttccagaatgatgcattgtttaacacggtttggaaataatatttattattttgtttaattactttaccagggtgttgcatatagtcatccatgtgtgacttctctgaagagccatctttttgcacttggaaattaattggttgtgatgttgcttgagaaacttgtgtgctttgattattagttgcgttcgtagcttctgttgccgcattgacttgttggctgtctgcgcctatgtatacaagggaacctaaaatgatagatgctgtacccattgtaatctttttcatagctgatgaacgttgttctgattgatacttactgtttaaataatgttttgtcatgttgttttcctcctaaggatacaaattatgtgttgttatatgagatgattaaccattgcaattgataatggttatcaattatactagcacatctattttcgtataacaataataaattgattataaaataaatattgacaatgataatcattattatttatgattttactaaagacttaaaagcaatcataaaaaggaggattatgttttgaaaaatattttaaaagtttttaatacaacgattttagcgttaattatcatcatcgcgacattcagtaattctgcaaatgccgcagatagcggtactttgaattatgaggtttacaaatacaataccaatgacacgtcaattgctaatgactattttaataaaccggcaaagtacattaagaaaaatggtaaattgtatgttcaaataactgtcaaccacagtcattggattactggaatgagtatcgaaggacataaagaaaatattattagtaaaaacactgccaaagatgaacgcacttctgaatttgaagtaagtaagttgaacggtaaaatagatggaaaaattgacgtttatatcgatgaaaaagtaaatggaaagccattcaaatatgaccatcattacaacattacatataaatttaatggaccaactgatgtagcaggtgctaatgcaccaggtaaagatgataaaaattctgcttcaggtagtgacaaaggatctgatggaacgactactggtcaaagtgaatctaatagttcgaataaagacaaagtagaaaatccacaaacaaatgctggtacacctgcatatatatatgcaataccagttgcatccttagcattattaatcgcaatcacattgtttgttagaaaaaaatctaaaggcaatgtggaataatgagaaatgttaaacaaattgctacaaaatctattatagctattattagcttaggtatacttacatatacaacaatgattggtagcgtgttggctgatgagataaaatatccatcagccaaatttaatcaacctgaagcaaaagataaaacagaattaactacatcaatttttgatgaaaagataaaagagaataaagcgttagagttactaatttttaatcaagaaaataaaaatgtaactgaggaacaacaactagttgacgaaaaggcgcaattgatttcagatatgactggtaaaatttacttgcaagtaaagctaaaaggtcaaatagataaagaacaacttgtttttcaaaatgacaaaaatgaagaatttccttttgttataaaagatgaaaaggatgacacaatagtaagaattttaattgaacagcatatggataaaatcaatatgcatgttaaaacgttggctgaaaagaaaaatctagataacaaagaaatggtgtattctattcattttaaagagaaaaaagtacaacatgatgatgcaaaagaagtgccttcaaaacatcaaaatcaagaaaataatcaagatcagcttaaaaaagatattgatgacaaaaaagatagtcaaaaatcagatactaaggaaagacgtactagcctttttactgaaaaaggattaaatgatattcctgtacaaaaagataaagtgcaacaagacagtaataaaaagattgaaaatgagcgacctaaagcatcaggtacattaaaagttgaaaatagccctccaacaataaaaaaggttgaaaataatcacaaagagcaaccgaaacataaagatgaaaaatcaaaaaaggaaaagaaaaaagtagttgaaaaagaaaaagcgttaccagcttttaatagagatgatgatagcaagaatagtagtcaattatctagtgatattaaagaacttgatgaaccaaatcataaaaagcaatatatgttatttgcagctggcattgtgttagcaactattttacttatttcggcacatttatacagcagaaagagaggtaaccaagtttgagaatcataaagtatttaaccattttagtgataagcgtcgttatcttaaccagctgtcaatcttccagttctcaagaatcaactaaatccggcgaattcagaatcgtaccaacaactgttgcattgacaatgacattggacaaattggatttaccaattgtcggcaaacccacgtcatataagacattgcctaatcgttataaagatgtaccggaaattggtcaaccaatggagccgaatgttgaagctgttaaaaagttaaaaccaacacatgttttgagtgtgtcaacgattaaagatgaaatgcaaccattttacaaacaattaaatatgaaaggctacttttatgattttgatagtttaaaagggatgcaaaagtcgattacacaattaggtgatcaatttaatcgtaaagcacaagcaaaagaattaaatgaccatttaaattctgtaaagcaaaaaattgaaaataaagcagctaaacaaaagaaacatcccaaagtattaatattaatgggtgtaccgggtagctatttagtagcaactgataaatcatatattggtgatttagttaaaatagcaggtggagaaaatgttattaaagtgaaagatcgtcaatatatttcgtctaatactgaaaatttgttgaatatcaatccagatattattttacgattaccacacggaatgcctgaagaagttaagaaaatgtttcaaaaagaatttaaacaaaatgatatttggaaacattttaaagctgtgaaaaataatcatgtttatgacttagaggaagtgccattcggtattacagcaaatgttgatgctgataaggcaatgactcaattatatgatttattttataaggataaaaaatagtgagttgatatgatgataaaaaataaaaagaaactactatttttatgtttgttagtcattttaatcgcaactgcttatatttcgtttgtaaccggtacaattaaattgtcatttaatgacctatttacaaaatttacaactggtagcaatgaagcagtggattcaatcattgatttgcgattgccacgtatattaattgcattgatggttggcgcaatgttagcagtttctggagcattattacaagcagcactacaaaatcctttggcagaggcgaatatcattggcgtttcctcaggtgcacttataatgagagcactttgtatgttgtttattccacaattgtacttttacttaccattattaagttttattggaggtttaataccatttttaataattatattgttgcattctaaatttagattcaatgctgtaagtatgatattagtaggtgttgcgttattcgtattattaaatggtgttttagaaattttaactcaaaaccctttaatgaaaattcctcaaggcttaacaatgaaaatatggagcgacgtatacatattagcagtatcagcattattgggattaatattaacattactattgtcccctaaattgaatttactaaatttagacgacatacaagcgcgaagtatcggttttaatattgatcgttacagatggttaacaggtttattagcagtatttttagcaagtgcaactgttgcgattgttggacaactagcctttttaggtattattgtgcacatgtggttagaaagctagttgggggcaattacagagtacttattccgttttctacagttattggtgcatggctattgttagtggctgatttattaggacgagtgatacagcctcctttagaaattccagccaatgctattttaatgattgtcggtggtccaatgctaatttacttaatttgtcaaagtcaacgaaatcgaatctaaaacggtacaacaactggtttagtgatgactgaagaaacgtcgttaataaaagaggatttttatgagaatgaagcgatttttaactattgtacaaattttattggttgtaattattatcatttttggttacaaaattgttcaaacatatattgaagacaagcaagaacgcgcaaattatgagaaattacaacaaaaatttcaaatgctgatgagcaaacatcaagaacatgtgagaccacaatttgaatcacttgaaaaaataaataaagacattgttggatggataaaattatcaggaacatcattaaattatccagtactacaaggtaagacaaatcacgattatttaaatttagattttgagcgagaacatcgacgtaaaggtagtatttttatggattttagaaatgaattgaagaatttaaatcataatactattttatacgggcaccatgtcggtgataatacgatgtttgatgtgttagaagattatttaaagcaatcgttttatgaaaaacacaagataattgaatttgacaataaatatggtaaatatcaattgcaagtatttagtgcatataaaactactactaaagataattacatacgtacagattttgaaaatgatcaagattatcaacaatttttagatgagacaaaacgtaaatctgtaattaattcagatgttaatgtaacggtaaaagatagaataatgactttatcaacgtgcgaagatgcatatagtgaaacgacgaaaagaattgttgttgtcgcaaaaataattaaggtaagttaaacagaaaagaggataattatgaaatttatggcagaaaataggctgacgttaacaaaaggaacagcaaaagatattatagaacgattttacacgagacatgggattgaaacattagaaggctttgatggcatgtttgttacacaaactttagaacaagaagattttgatgaagtgaaaattttaacagtttggaaatcaaagcaagcttttacggattggttaaaatctgatgtctttaaagcagcgcataaacatgttagaagtaaaaatgaagatgaaagtagcccgattataaataacaaagtaattacatatgatataggctatagttacatgaaataattgaatttaaagaggttgcagtacttgttatgacaattggtattgttagcttttgtaacgaccatacatgataccgatgatggtcgtttttttaatgaacacaaacatgctaacaacaaattgctaaaacatagtttgatttgaatgtgctttgaaaataatcatcaattatatcattttgatttattttgaagaagaaaagaattaataatgatattttggggcgtatgatttatagtagtagtatcgataaaagaaatttatacaatttgaaatattatgagtgataaaagcgattaattaatattaactatacaatcaaatgttttcatcttattaatgattaatatttttatttttaaaaataaagcgaggagctatcaatggaacaaattacttctgcacaaaataatagaattaaacaagcgaacaagctaaaaaagaaacgtgagagggataaaactggattagctttaattgaaggtgtgcatttaattgaagaagcttatcaaagtggaattgtaattacacaattatttgcaattgaaccggcaagattagatcagcaaattatcgcatacgcgcaagaagtttttgaaataaacatgaaagttgctgaatctttatcaggtacagtgacaccacaagggtttttcgcaatcattgagaagccgcattatgatatttctaaagcacaacaagtattgctcatcgatcgtgttcaagatcctggaaatttaggcacattaattagaactgcggatgctgctggaatggatgctgtaataatggagaagggtacgacagatccttatcaagataaagtgttgcgagcgagtcaaggtagtgttttccatttgccagttatgacacaagatctcgatacgtttattactcaatttaatggtcctgtttatggtacagcacttgaaaacgcagtggcatacaaagaagttacttcaagtgattcttttgcattactattaggtaatgagggagaaggtgttaatcctgaattattagcacatactacacaaaatttaatcatacctatttatggtaaagctgaaagtttaaatgtagcgattgcaggtagtattttactttatcatttgaaaggttgaccgtgttgaaagttttccgatataattataattaattgtttaacagaacatttctacgtgaatgcatacacaattgaatataaaccaataaaaaggcatggacatttatataaataattgttttagggagaataatcgtgactgcaagttattccaattatttaaagtcttttcacctttttggttacttaaagagatttaagtcggaaagacaatccgttatcaatattaaacaagtgtatgcttaggcataaatttgggtggtaccacggaaatgactttcgtcccttattttttaagaggatgaaagtctttttttagttaaacaacaaatatgataaatagaaaatgaatagttcgaatagggaggtcagtgacatatgtctgaacaacaaacaatgtcagagttaaaacaacaagcgcttgtagatattaatgaagcaaatgatgaacgtgcactgcaagaagttaaagtgaaatacttaggtaaaaaagggtcagttagcggactaatgaaattgatgaaggatttgccgaatgaagataaacctgcgtttggtcaaaaagtgaatgaattgcgtcaaacaattcaaaatgaattagatgaaagacaacagatgttagttaaagaaaaattaaataagcaattggctgaagaaacaattgatgtatcattaccaggtcgtcatattgaaatcggttcaaagcatccattaacacgtacaatagaagaaattgaagacttattcttaggtttaggttatgaaattgtgaatggatatgaagttgaacaagatcattataacttcgaaatgctgaatttacctaaatcacaccctgcacgtgatatgcaagatagtttctatattacggatgaaattttattacgtacgcatacatcaccagtgcaggcacgtacgatggaatcacgtcatggtcaaggtccagttaaaattatttgccctggtaaagtgtatcgtcgtgactctgatgatgcgacacatagtcatcaatttacacaaatcgaaggattagttgttgataaaaacgttaaaatgagtgatttgaaaggtactttagaattgttagctaagaaattatttggtgctgatcgtgaaattcgtttacgtccaagttacttcccattcactgaaccttctgtagaagttgatgtgtcatgttttaaatgtaaaggaaaaggttgtaatgtgtgtaaacacacaggatggattgaaattttaggtgctggaatggtacatcctaatgtattagaaatggctggttttgattcttcagagtactctggatttgcatttggtatgggaccagaccgtattgcaatgttgaaatatggtatagaagatattcgtcatttctatactaatgatgtgagatttttagatcaatttaaagcggtagaagatagaggtgacatgtaatgttgatatcaaatgaatggttgaaagaatatgtaacaatcgatgattctgtaagtaatttggcagaacgtattacgcgcacaggtattgaagtggatgatttaattgactacacaaaagatatcaaaaatttagttgtcggcttcgttaagtcaaaagagaaacatcctgatgctgataaattaaatgtttgccaagttgatatcggagaagacgaacctgtacaaatcgtttgtggtgcaccgaacgttgatgcaggacaatatgtcattgttgctaaagtaggtggcagattgcctggtggtattaaaattaagcgtgccaaattacgcggtgaacgttcagaaggtatgatttgttcgttacaagaaattggtatttcaagtaactatataccgaaaagttttgaatcaggcatttatgtatttagtgaagcccaagttccaggaacagatgccttacaagctttatatttagatgatcaagtaatggaatttgatttaacgccgaatcgtgcagatgctttaagtatgataggtactgcttatgaagttgcagcattatataatacaaaaatgactaagccagagacaacatcaaatgagcttgatttatctgcaaatgatgaactgactgtgacaattgaaaatgaagataaagtaccatattatagtgcacgtgttgttcacgacgtgacaattgaaccctcgccaatttggatgcaagcacgcttaataaaagcgggtatacgtcctattaataatgttgttgacatttcaaattatgtgttattagaatacggtcaaccattgcacatgtttgatcaagatgcgattggttcacaacaaattgttgttcgtcaagctaatgaaggcgaaaaaatgacaacattagatgatacagaacgtgaattattaacgagcgatattgtcattactaatggacaaactccaattgcattagctggtgttatgggtggcgatttttcagaagttaaagaacaaacatcaaatatagtgattgaaggtgctatttttgatccagtttcaattcgtcatacatcaagacgtttaaatttacgcagtgaatcatctagtcgttttgaaaaaggaatagctactgaatttgtagatgaagcagtcgaccgtgcatgttatttattacaaacttatgcaaacggaaaagtgctaaaagatagagtgtcttcaggagaacttggtgcatttattacaccaatcgacatcactgctgataaaattaatcgcactattggatttgatttgtcacaaaatgatattgttactatttttaatcaactagggtttgatacagaaataaatgatgatgttattacagtgctagtaccatcacgtcgtaaagatattacaattaaagaagatttaattgaagaagttgcacgtatatatggatacgacgatattccatcaacgttacctgtcttcgataaagttactagtggtcagctaactgatcgccaatataaaactagaatggttaaagaagtgttagaaggtgctggattagaccaagctattacgtattcgttagtttctaaagaagatgctactgcattttcgatgcaacagcgtcaaacaattgatttattgatgccaatgagtgaagcgcatgcgtcattacgtcaaagtttattaccacatttaatcgaagcggcatcatataatgtggcacgcaaaaataaagatgtaaaattatttgaaatcggcaatgtcttctttgctaatggagaaggtgaactaccagatcaagttgaatatttaagtggtattttaactggagattatgtagtcaatcaatggcaaggtaagaaagaaacggttgatttctatttagcaaaaggtgtcgtggatcgagtatctgaaaagttaaatcttgaatttagttatcgccgtgctgatattgatggattacatccaggtcgtactgctgaaatcttattagagaataaagttgttggttttattggtgaattacatccaatattagcagctgataatgatttaaaacgtacgtatgtttttgagttgaattttgatgcattaatggctgtgtcggtaggttacattaattaccagccaattccgagattcccaggcatgtctcgtgacattgcattagaagtagatcaaaatattccagcagctgatttattatcaacgattcatgcacatggtggcaatatattaaaagatacacttgtctttgatgtatatcagggcgaacatttagaaaaaggtaaaaaatcaattgcaatacgtttaaattatttagacacagaagaaacattgacagatgagcgcgtttcaaaagtacaagcggaaattgaagcagcattaattgaacaaggtgctgttattagataatgatttaaaccccatgtataaggatatctgaagtagattgatatccctaacatggggttttatttttgggttcaccaatttggttccaatgcatttaaaaagtcaaagaggaacagcggaatacagatgatgcttcgcacaactgcataaaagcctctaatgattaaaaatcaaagaggctttaaaattttttgggctttttcacgatttttaaaatgcttttttgaaatggtatctaaacgtgaaagaccgtatttttttataattttggcggcgattacatcgactttagcaccggcacctttaggaatcgtcatattaatattttttgatatttgatccatatatgtaacaaatgcgtatcgagaaattatgcttgccactgcaatggctaatgacttcgattctccttttgtttcaaattttgttttctttggaagtggtatatctgataatgcgtaatggctatacacttcgcgttttgcgaactgatcaatgacgatatagtctaattgagacgaatcaattttttcaagtacatttttgatggcttcattatgaagggcagctttcatttttacttgagtccagccttttgcttgctgaatattatatttttcattgtgtagtgttaataatgaatgtggtatgaaagtaaccaattgctcagcaagttctacaattttggtatcggttaatttttttgaatcatctacacccaaagtttttaaaatagggacatgctctttggtaacgaaagcagcacacacagtcaacggaccaaagtaatcgccacttccagcctcatcactaccaatacagttaaattgatcatacattaaagtttgttcaagaaaagaattagccatatttttctttttagttttattagtattcaattgagaatgctgcggtagaagttcttcagacacagcttctgcatgattaccttgaaacatgactttacctgattggtaaatatttacagttgtattttgatactttgcacgtgctttcataccttgaggtaaattctcagtatcaaaagaaatgcgtgacattaatgtcgttatgtctttatccgacaatttaaaaacgatattcgccatttgtgtaaatcctttcataaaatttcattgtctttagcaaaaataatcatatcataaatgataataacgtcagaaacatttatgtatgttgtaaagaattaattgcggatacttacaaaatacatagtggtcatgtataatgtttatgaaaatgttatagtgacacaatttaaacatgataaagtattgaatagaaaattctttacattatttcattataaaaagaacattaagtcatctatagagattgtgttgttgttttatcataattgcaatataacaatattagtatcaaattcagacaaactatccagtcatattttataacgtgaatttagattttaaaaaaaggatcaggagaaattataaatgacacagtttaaaaacaaggtaaatgtatcaattaatgatcagctttttacaattgttggggaagataacccagagcacatacgatatgtagcacatttagttgatgataaaataaaagaattagggtataaagcagcaggtttagatacttcaagaaaagcaatactaactgctgtgaatattatgcatgaaaaagtactactagaagaaaaaaaatcgacgtttgaaacaacaaattcacaaattgcagcagcgtgagcaataaatggtcattgattttatcataatcattttctttgtgtattttgtcatcgttggattcagacgaggtttttggttatctatgatacatttgagtgcaacgattgtatcattgtggattgccagtcaattttacaaatctattgtagaaagattaattgtatttattccatatcctaaaacaacagcatttaatacaacttttgcgtttcattttaatcatctacaaaatcgatttgaagcgattgtagcttttttaatgattacattgttttgtaagttcattttatatctaattatcgtaacttttgataaaataatagcgtatcaaaacattcatattttcagtcgtgcaatgggaatgatagttggtgtgtttatgacgataattgtcttacactttacgttatatctattggcattatatcctaacgaagcattacaacatcagcttaaaatatctattgtgagtcattcattgatttttcacatcccatatttatcggctttcaccattaatttataaattatcataagaggtcaggacaaaggtatatattaatgatacgtcctggtcttctttttatggagtgttattatgacaaaaaaagatgttatcaaactattagaacaaattgctacttatatggaattaaaaggggaaaatacttttaaaatatcagcgtatcgaaaagcagctcaaagtcttgaattagatgaacgaccattagatgaaatatctgatgtaacggagttaaaaggcattggtaaaggtgttgcagaagtaatcaatgattaccgtgagaccggtgaatctcagtatttacagcaattacaggaagaagttccggaaggtcttattccacttttgaaaattcaaggacttggaagcaagaaaattgctaagctatataaagagttgaatattgttgataaagcgtcacttcaagttgcttgtgaaaatggaaaagttagtgaattaagcggatttgctaagaaaacggaacaaaacatattagaagctgtgaaacaacttggtgctaagaaagatagatatccaattgatcaaatgagaagacttaatcaagaaatcattgattatatagatacattaaattatatcgatcaatattcatctgcaggaagcttccgtcgttttaaagaaatgagcaaagatttagatttcataataagtaccgataacccaaaagcagtgcagcagcaattattaaatattcccaataaagtaaaagaagttgcagtggggaacacaaaagtttcattagaattagcgtatgatgatgaaacgattggtgtcgattttcgattaattgaaccaagtgctttttatcatacattgcagcattttactgggtcaaaagaacataatataagaattcgacaacttgctaaagcacgtgatgaaaaagtaagtgaatatggaattgaacaagctgatggtacattaattcaatatgatagtgaagccaagatatatgaacattttaatgtgaattttataccacctgctatgcgagaagatggtagcgaatttgataaagatctaagtaatatcattacaatagatgatattaatggtgatattcatatgcatacaacgtatagtgatggtgcgttttctattcgagacatggtagaagcaaatatcgcaaaaggttataaattcatggtaattactgatcattcacaaagtttacgtgttgctaatggcttacaagtagaaagacttttaagacaaaacgaagaaattaaggctttagataaagaatatagtgaaattgatatttattcaggtacagaaatggatatattacctgatggctcgctggattatgatgatgaaattttagcacaacttgattatgtaattggagctattcatcaaagctttaaccaatcagaagaacaaattatggaacgattagctaatgcatgtcgcaatccatacgtgcgacatatagcgcatccaacagggcgtattataggtagaagagatggttataaaccgaatattgaacaattaatggcattagctgaagaaacgaatacagtattagaaattaatgccaatccacatcgactggatctgagcgctgatatcgttcgtaaatatccaaatgtgaaattaactattaacactgatgcgcatcatacaaatcatttagattttatgaattatggcgtagcaactgcgcaaaaaggatttgtaacaaaagatagagtgattaacgcattatcgcgtgaagcttttaaagactttattgaaaataatacaaaacttaagaaatagagggattttatgagacaaaaaacattagacgtcttagaatttgaaaaaataaaatcactcgttgccaatgaaactattagtgacttaggcttggaaaaggtcaatcaaatgatgccagctactaattttgaaacggttgtttttcaaatggaagaaacggatgagattgctcaaatctataataagcatcgtttaccaagcttgagtggcttatctaaagtatcagcattcattcatcgcgctgatattggcggcgttttaaatgtatcagagcttaacttgataaaaagattaattcaagtacaaaatcaattcaagacattttataatcaattggttgaagaagatgaaggtgttaaatacccaatattagatgacaagatgaatcaattacctgtgttaactgatctttttcaacaaataaatgaaacatgcgatacgtatgatttatatgataatgcgagttatgaattgcaagggattagaagtaaaatttctagcacgaatcaacgtattagacaaaatttggaccgtattgttaaaagccaagcaaatcagaaaaaattatcagatgctattgtaacagttaggaatgaaagaaacgttatacctgtcaaagctgaatatcgacaagattttaatgggattgtacatgatcaatctgcttcaggacaaacattgtatattgagccatcatcagttgttgaaatgaataatcaaattagtcgattacgtcatgacgaagcaattgaaaaagaacgcattttaacgcaactaactggttatgtggctgcggacaaagatgcactacttgtggcagaacaagtcatgggtcagttagattttttaatcgcaaaagcgagatatagtagaagtattaaaggaacaaagccgatatttaaagaggaccgtactgtatatttacctaaagcataccatccattattaaatcgtgagactgttgtagctaataccatcgaatttatggaagatattgaaacggtaattattacaggaccgaatacaggtggtaaaactgtaacattaaaaacattaggtttaattattgttatggctcaatcaggattgttgattcccacacttgatggtagtcagttaagtgtatttaaaaatgtatattgcgatatcggagatgaacaatcaatagaacaatcattatcaactttttcatctcatatgacgaatatagttgaaattttaaagcatgcagacaaacatagtttagttttatttgatgaattaggtgcaggtacagatccgagtgaaggtgctgcattagcaatgagcattttagatcatgttagaaaaattggttctctagtaatggcaacgacgcactatcctgaacttaaagcatatagttataatcgagaaggcgttatgaatgcgagtgtagaatttgatgtagatactttgagtccaacgtataagttattaatgggtgtgccgggtcgttcaaatgcttttgacatttctaaaaagttaggtcttagtttgaatattattaataaggctaagacgatgattggtactgatgaaaaagaaataaatgaaatgattgaatcattagagcgtaattacaaacgtgtagagacacagaggttagaactggaccgtcttgtaaaagaagcggagcaagtgcatgatgatttatctaagcagtatcaacaattccaaaattatgaaaagtctctaatagaggaagcgaaagaaaaagcaaatcagaagattaaggctgcaacaaaagaagctgacgatattattaaagacttaagacaattgcgtgaacaaaaaggtgcagatgttaaagaacatgaattgattgataagaagaaacgattagatgatcattatgaagcgaaatctataaagcaaaatgtacaaaagcaaaaatacgataaaattgttgctggtgatgaagtaaaagtattatcttacggtcaaaagggtgaagttttagaaattgtcaatgatgaagaagcaattgttcaaatgggaattattaaaatgaagttacctattgaagatttagagaaaaaacaaaaagaaaaagttaagccaacgaaaatggttacacgtcaaaatcgtcaaacaattaaaactgaacttgacttacgaggctatcgttatgaggatgctttaattgaactagatcaatatttagatcaagccgttttaagtaattacgaacaagtttatatcattcatggtaaaggtacaggtgcacttcaaaaaggtgtacaacaacatttgaaaaagcataaaagtgttagtgactttagaggtggtatgccaagcgaaggtggatttggcgttaccgttgcaacactaaaataaattataatttgataaattaaatagctgcagttaaaataatgtaaagcaacaagaatacatttcaaacatgttatttgaaataagcataaaaattgagcaaatagaaatacatgaagcatgttatctgatataatttgaacatcataataataattaaggaggattggcatttatggcaatcgtaaaagtaacagatgcagattttgattcaaaagtagaatctggtgtacaactagtagatttttgggcaacatggtgtggtccatgtaaaatgatcgctccggtattagaagaattagcagctgactatgaaggtaaagctgacattttaaaattagatgttgatgaaaatccatcaactgcagctaaatatgaagtgatgagtattccaacattaatcgtctttaaagacggtcaaccagttgataaagttgttggtttccaaccaaaagaaaacttagctgaagttttagataaacatttataagttacaaccaatgacgactggggcatttctttaatgaattgctccagtttttgtttgtgtttttaatataaaaagttgaatgataagtcatcatattgtttacgacttgagaatggtgggattaataaatctatgaacgttaaatgataatctagcatgctgatagatttgtagcagttggtttgataaaaccatgttcaatattacatgatgtgcatgaaaagtcatactcgaagatgttgattattaactagaattagtggtgataaatttgaagcacttttgtagcatcattcattttaaaattagaaggggggatatttttggaagactataagcaacgaattaaaaataaattaaatgtcgtacctatggaaccaggatgctatttaatgaaagatcgtaatgatcaagtgatatatgttggcaaagctaaaaagctaagaaatcgattgcgatcatattttacgggtgctcatgatgctaaaacaacgagactggttggtgaaatacgtcgctttgagtttattgtcacgtcaagtgaaacagaatcacttttactggaattgaatctgattaaacaatatcaaccaagatataatatattattaaaggatgataaaagttatccatttattaaaattacgaaggagaaatatcctagactactagtgacgagaactgtaaaacaaggtactggcaaatatttcggaccgtatccgaatgcatattctgctcaagaaactaaaaagttattagacagaatatatccatatcgcaaatgtgataagatgccagataaattatgtctttattaccatattggacaatgtttaggaccatgtgtatatgacgttgatttgagtaaatacgcacaaatgacgaaggaaattactgattttctgaatggggaagacaaaacaattttaaaaagtttagaagagcgaatgttaactgcaagtgaatcacttgattttgaacgggctaaagaatatagagatttaattcaacatattcaaaatctgacaaacaaacaaaaaattatgtcatcagataaaacgattcgtgatgtctttggttatagtgttgataaaggatggatgtgtatccaagttttctttatacgacaaggtaatatgataaagcgagatacaacgatgattccattacagcaaacagaagaagaagaattttatacatttattggacaattttatagcttaaaccaacatattttacctaaggaagttcatgtaccacgtaatttggataaagaaatgattcaatctgttgtggacactaaaatcgttcaacccgcgcgaggtcccaaaaaagatatggttgacctagctgcacataacgctaaagtatccttaaataataaatttgaattaatatcacgtgatgagtccagaacgattaaagctattgaagaacttggaacacaaatgggaattcaaacaccaattagaattgaagcattcgataattctaatattcaaggtgtggatccagtgtcagcaatggttacatttgtcgacggtaaaccagataagaaaaattatagaaagtataaaatcaaaacggttaaaggtccagatgattacaaatcaatgagagaagtagtaagacgacgatattctcgcgttttaaacgaaggattaccattacctgatttaataatagtagatggtggtaaaggacatatgaacggggttattgatgtgctacaaaacgaattaggtcttgatatccctgttgcaggtttgcagaaaaatgataaacaccaaacatctgaattattatatggcgctagtgcagaaattgtaccactgaagaaaaatagccaggcattttatttgttgcaccgtatccaagatgaggttcacagattcgcaatcacatttcatagacaaacacgtcaaaagacaggcttgaaatcaatacttgatgatatagatggtatcggtaacaaacgtaaaacattattattgcgttcattcggttcaatcaagaaaatgaaggaagctacacttgaagattttaaaaatataggtattcctgaaaacgtcgcaaagaacctacatgaacaattgcataaataaattactgggcgtgagaatcattctcatgccccaaaatatatgaaataatgttacaatatggttaacaaagttatttttttgaatgtacgtggaagcgttttctaaatgagaaagtttatcatcacaagcaattttaaatatcgaatccaaatgttacattgttcgacatgcagtttggtgatcgtgcagtgtgtatttgtctttaaaatgtttcgcttaatgataatgacaacgctagaaacgatatcactttagggggttaagcgtacgtttaatataaatagctcaataaattaaatattcgttcacaggggggactccttttggctcaatcaaaaaatgaattttatctaagacgtattcactcgttattaggtattatcccaataggtgcatttttggtcgttcatttattagtgaatcaccaagcaacacaaggtgctgaagcgtttaataaggcatctaactttatggaatcattaccatttctaattattgtagaatttttatttatatacattccgttgttatatcacggtttgtttggtatacacattgcatttacagcaaaagaaaatgttggacattactcgatttttagaaactggatgttcttcttccaaagagtgagtggtatcttaacatttatctttattggtatccatttatggcaaacacgtttacaaaaagcattttacggcaaagaagtgaattacgatttaatgcacgaaacattgcaacatcctggatgggcaatattttatattatttgtattattgctgttgtgttccactttgcaaatggcttatggtcattcttagttacttggggtggacttcaatctccaaaatcacaacgagtatttacatgggtttcattaatcgtatttttagttatttcgtatattggtgttactgcaattattgcctttatgtaatacatcgcatttaacaaatatagattgaaaatttaggggagtgaaatttttatggcagagaaacatcttattgttgtcggaggtggcctagcgggcttaatgtcaacaattaaagcggcagaaaaaggtgcacatgtagatttgttctcagttgtaccagtaaagcgttcgcactctgtttgtgcccaaggtggcattaatggtgcggtcaatactaaaggggaaggcgattctccttggattcactttgatgatacagtgtatggtggcgatttccttgcaaaccaaccacctgttaaagcgatgacagaggcagcacctaaaattattcatttattagaccgtatgggcgtaatgttcaatagaacaaatgaaggtctattagattttagacgtttcggtggtacattacatcacagaacagcatatgcaggggcaacaactggacaacaattattatatgcattggatgaacaagttcgtgcatatgaagtagatggattagttacgaagtatgaaggatgggaattccttggcatagttaaaggtgacgatgatagtgcaagaggtatcgttgcacaaaatatgacaactgctgagattgaaacatttggttcagatgcagttattatggcaacgggtggccctggtattattttcggtaaaacaacaaactcaatgattaatacaggatcagcggcttccattgtttaccaacaaggcgctatttatgctaatggtgagttcattcaaattcatcctactgcaatccctggtgatgataaactgcgactaatgagtgaatcagcacgtggtgaaggtggacgaatttggacatataaagatggtaagccttggtacttcttagaagagaaatatcctgattatggtaacttagtacctcgtgatatcgcaacgcgtgaaattttcgatgtatgtattaaccaaaaattaggtataaatggcgaaaacatggtatatcttgatttgtcacataaagatccacatgagttagatgtaaaactaggtggtatcattgagatttatgaaaaattcactggtgatgacccacgcaaagtaccaatgaagattttcccagctgttcactattcaatgggtggtctatatgtagattatgatcaaatgacaaatattaaagggttatttgcagctggagaatgtgacttctctcaacatggtggtaaccgcttaggtgccaattcattgttatcagcgatttatggtggtacagtagcaggtccaaacgcgattgattatatttcaaatattgatcgatcatatactgatatggacgaaagtatttttgaaaagcgtaaagctgaagagcaagaacgttttgataaattattagctatgcgcggtacagaaaatgcatataaattacaccgtgaacttggtgaaattatgacagcaaatgtaactgttgttcgtgaaaatgaaaaactgttagaaacagataaaaagattgttgaattgatgaaacgttatgaagatattgatatggaagatactcaaacttggagtaaccaagcggtattctttacccgtcaactatggaacatgttagtacttgcacgtgttattacgattggtgcatataaccgtaacgaatcacgcggtgcccattataaaccagaattcccagagcgtaatgatgaagagtggttaaaaacgacaatggcctcattccaaggcgcatttgaaaaaccgcagtttacttatgatgacgtcgatgtgagtttaataccacctcgtaaacgtgattacacaagtaagtctaaagggggtaaaaaataatgactgaacaatcagtgaaaaacactccacaacatgaaacacaatctaaaccgaaacaaaaaacagtaaaattaattattaaacgacaagatacaagtgattctaagccttatgaagaaacatttgaaattccatatcgtgaaaatttaaacgtcattgcttgtttaatggaaattagacgtaacccagttaatattaaaggtgaaaaaacaacacctgttgtctgggatatgaactgcttagaagaagtatgtggagcatgttctatggttatcaatggtcgtgcaagacaatcttgttctgcgattgttgatcaattagaacaacctattcgtttagagccaatgaatactttcccagttatccgtgacttacaagttgatcgttctagaatgttcgataacttaaaacgtatgaaagcatggatcccaattgatggaacgtatgatttaggtccgggaccacgtatgccagagaaaaaacgtcaaacagcttatgaattatctaaatgtatgacatgtggtgtatgtttagaggtttgtcctaatgttactgaaaataataaattcgttggtgcacaagcaatctcgcaagttcgtttgtttaatttgcacccaacaggatctatgactaaagatgaacgtttaaatgcattaatgggtactggtggcttacagcagtgtggtaattcacaaaactgtgttaatgcttgccctaaaggtattccattaacaacatccattgcagcaatgaacagagaaacaacattccacatgtttaaatcattctttggttcagaccatgaagtagaataaaaattaatcccttttgagttaaaatgttatgttcctttcaaaattaaattgaatggagatacacaataacttggaagggatttttttaataagcagattacatgacaatatgatagtgggctgatttaaaataaatattataatgacaaaaatggtaaacacagtgcataatactaaaatccaatgcttagttatgataaactaaaaattaaattaaaagtaaggatgaccgaatatgaataaaccaataggtgtaatagactctggtgtcggaggtttgacagtagctaaagaaattatgcgtcagttgccaaatgagacgatttattacttaggtgatattggacgatgtccatatgggccaagaccaggagaacaagtaaaacaatatacagttgaaatcgctcgtaaattaatggaatttgatataaaaatgctcgtgattgcttgtaatacagcaactgctgtagctttagaatatttacaaaagaccttatcaatcccagtgattggcgtaattgaaccaggtgctagaacagcaataatgactactagaaatcaaaatgtattagtactaggaacggaaggcacaattaaatctgaagcatatcgtacgcatattaaacgtatcaatccacatgtagaggtacatggcgttgcctgtccaggttttgtgccacttgtagaacaaatgagatatagtgatccaacaattacaagcattgtcattcatcaaacactgaaacgttggcgtaatagtgagtctgatactgtcattttaggatgtacccactatccattgctctataaacctatctatgattattttggtggtaaaaagacagtgatttcgtctggattagaaacggctcgtgaagttagtgcattgctaacatttagtaatgaacatgcaagttatactgaacatccagatcatcgattttttgcaacaggtgatcctactcacattactaacattatcaaagagtggttaaatttatctgtcaatgtggaacgtatatcagtgaatgactaggaggatttttaatgaaagagattgttattgcatcgaataatcaagggaaaataaatgactttaaagtaatatttccagattaccacgtaataggtatttcagaactaataccagattttgatgtggaagaaacaggatcaacatttgaagaaaatgctatattaaaatcagaagctgctgcaaaagcattgaataaaacggtcatagctgatgacagtggactagaagtttttgcattaaatggtgagccaggtatatactctgcacgttatgctggtgaaaataaaagcgatgaagcaaatattgaaaaattattaaataagcttggtaatacaactgatcgtcgtgcgcaatttgtttgtgtcataagtatgagtggccctgatatggaaacaaaagtatttaaaggtactgtttcaggtgaaattgcagatggaaaatatggcgaaaatggtttcggatatgatccgatattttatgtaccgaaattagataaaaccatggctcaactttcaaaagaacaaaaagggcaaattagtcatagacgaaatgcgattaatttacttcaagcttttcttgaaggtgataaaaatgtctaaatggattattgtgagtgataaccatactgaatcaggcgttttatatcaaatttatgaaatgcacccagatgcagatgtatatttacatttaggagattcagaattcgcgtatgatgatacggaacttagcttatttaatagagtaaaaggcaattgtgatttttacccagaatttgaaaatgaagcggtcgcaaaatataatgacgtgaaagcattttatactcatggacatttatatcaagtcaatcgaacaagagatttattagctgaaaaaggacttgaattaggttgtttgtttgcattttatggacatacacatgtggcaaaatatgagtatattaatggtgttcatgttattaatcctggaagtatatctcaatctagaagttcaatggaagaaacatatgctgaagttattattgatgatcaaactttacatggcaccatcaatttcaaaaatcgacatcacgaaacaatcagtcatactactttttaaatagaagtagctatggctttttttagtttatagactgatttaactaggaggtcgtgtcatcaatgtttgtttaaaagtatttctgacaattttataagataattggaatgaataacacatttatgttatgaaaagaattgtaattttggagaatgtgattgttgataaccctatatggttgaatcatgttgattatttggttaaaagtgtattattaaaaagtataaaattaagattccaagaagtcaggaaatttgaaattttagttaaaatcatgaatcgtatacatatttaaaaggatttctaaagtcataaattatatcaataatttgatggttaaaatatggagtagcaaaattcttgaaattcagaaatgtagtgacacaaatattaatgtttagttaataaatagttaatgtagttttttgtatctgtctattattataaatatatacaaaataaatatttgaggataggtgttattaattatgaaaaagaattttattgggaaatcaattttaagcatagctgctattagtttaacggtatcaacgtttgccggtgaatctcatgcacaaactaaaaacgttgaagctgctaaaaaatatgatcagtatcaaacaaactttaaaaaacaagtaaataaaaaagttgtggatgcacaaaaagctgtaaactttttcaaacgtacaagaactgttgcaacacaccgtaaagcacaaagagctgttaatttaattcatttccaacacagttatgaaaagaaaaaattacaaagacaaatcgatctagttttaaaatataatactttaaaataattgatagaagccatgctatagagtgtggctttttgctatatccaaaggtataattattttataatattgtgtttatttgaatggtgagcttattgggataaataatataaataattacttaaaagtgaatgcaatagttgtttatgttttgaacaagcgaggtggctattgtgaaaaggaaatcgaatgtattaacaatcataaaaattgtaacggatatagtggcaaccgtgttaatcatacgtgctttattaaacagtcgtaaagatgctaaataaattggaagttacttaaaataaaaaagcacgccaatacgttagcattgttttctaacgtttggcgtacaactatttaattcagtatgttttttaataccaagtaatcgagtcgatttcaccgtttttaacaactttaatattttttctgttctcttctaaaggacgagttaagtcaaaagtatagtaatctctaggaccaccatctttaattctgacaactgctttcttcacatcaccttggcttaattttttaacaataaggtacagatcattaacagtttcagctttgtaaggagttagatttttatcagactctttcattaacttatcaatacgttcatcgtcctttttagcttgatctgctaaattttttgcgatttctaaacctttccattcataactaaagaaagctttagcatcattagtttgagttaaaagacctgcagcgattactgtagatgcgataatagtttttgtgatattttttttcataataagttctccctgtaaaataaatttgtacttactaatgcgagtacactgctattttacaaacggtttcatacatttaccagttaacacttcattaattaaaattaagtgcaaattaataaggtttaatgcaatcgaaaaagaataatgatgaatttgatggtattatttttatttgaggtattattgaatttgttgatagtataataatagtagtaaacgtcactcaactatgattgaataatttttattgctaaaacgatatttacatttctctacattttgtttgctaagttggatagacaaacactccaaattgttatacatatagctgttttgatatatattttttataaaacaaagaaatgattcatagtagagaagtaattaatatgtataattttacttataaagaaataagagatatattctaattatggttgatatgttatgattaatatataagttaaaaattatactatttaattgaattatgcattttcgaagtaaacataattcaacacttacatttttaaatagataaaatagtgtaaaatcacgtgccaagattactatagagtaggcattgagtattattggcaatcacttaagtgattgttatttttcgtggtcaataataaagatataaataaatatattgaggtcaaacgatgataattaaaattttaacaattctattactactttgtatattgagctatttggttacaaatagaaagaagccttttctgttcttaaagacactctttatgggtgtggtatttatctttataggatatatttcactggcaatatctgccgtaattatttatggtattattcaatttatcacaattgattttggtagttttttcttaatgggtattatattgatcttgatttcaagtatattccaattatttatagttagattactttttagaaaaaagaatgtcgatttgacagaggttgtcgttttagagcatttaattcaatggttcttagtttactttgcgatctatcaagcagtaaatgaaaaaatggacattaatgatattaatatcgacaatttccaatctgtcttttttgacgtgtctaatttgaatttagtaattctaccaacgttaatcattagctgggtcacaatatttaactatagaatgagaagttacaaataaaatctatgagattataccttcagacaccaacattcaaatggtgtcttttttgttgtgtggttttatttttgaaattcgaaaaagtagaggcatgaattttttgactagtgtataagtgctgatgagtcacaagatagatagctatattttgtctatattataaagtgtttatagttaattaataattagttaatttcaaaagttgtataaataggataacttaataaatgtaagataataatttggaggataattaacatgaaaaataaattgatagcaaaatctttattaacattagcggcaataggtattactacaactacaattgcgtcaacagcagatgcgagcgaaggatacggtccaagagaaaagaaaccagtgagtattaatcacaatatcgtagagtacaatgatggtacttttaaatatcaatctagaccaaaatttaactcaacacctaaatatattaaattcaaacatgactataatattttagaatttaacgatggtacattcgaatatggtgcacgtccacaatttaataaaccagcagcgaaaactgatgcaactattaaaaaagaacaaaaattgattcaagctcaaaatcttgtgagagaatttgaaaaaacacatactgtcagtgcacacagaaaagcacaaaaggcagtcaacttagtttcgtttgaatacaaagtgaagaaaatggtcttacaagagcgaattgataatgtattaaaacaaggattagttaaataaaacttcaatcgttgctgttatctggaaataattaattaaatgttatgttaatttttgttaatgaaaaaagtaatctatttaatgacaggttaatgtaattgtcctgaaattgactatatactcagtaagtatcaattttaaggagagcttataatgaaatttaaaaaatatatattaacaggaacattagcattacttttatcatcaactgggatagcaactatagaagggaataaagcagatgcaagtagtctggacaaatatttaactgaaagtcagtttcatgataaacgcatagcagaagaattaagaactttacttaacaaatcgaatgtatatgcattagctgcaggaagcttaaatccatattataaacgtacgattatgatgaatgaatatagagctaaagcggcacttaagaaaaatgatttcgtatcaatggctgatgctaaagttgcattagaaaaaatatacaaagaaattgatgaaattataaatagataataaataaaacaggttgagacaaaaaatggtcttaacctgttttcaatttgcatatgtgataaattctatatcaaaatgcttatgtataatgaatgacatttaaaagtaggggagacaaatataaatacaatagttcctaggattactctcaaaataactatatcaattatttactttgctctcctattttttaaaatatgtacatgtttaaacaatcaaaagtgtacaatattaaattatcatttccagttctagtgctatattggtagtagttgactaaatgaaaataagcttataacaagttttttcaatactcgtggggccacaacagagagaaataggatcaccaattccaacagacaatgcaagttggcggggccccaacatagagaaattggatcaccaatttcaacagacaatgcaagttggggtggggcccaacacagaagctggcgaaaagtcagcatacaaaaatgtgcaagttggcggggccacaacagagagaaataggatcaccaattccaacaaacaatgcaagttggcgggggccccaacatagaagctggcgaaaagtcagcttacaaaaatgtgcaagttggcggggccccaacatagagaaattggaaccccaatttctacagacaatgcaagttggggtaggacatcgataaagaaatactttttctttagcaattagtatttcttatgcatgagctttactcatgtattcattttttaagtacacattagctacagctaatgataaagaaccactacataataaatcattagtggttctttatcatttctatctcactcttttactggaagaaaaagtttacgtttgtagaacatgccacaataccaaaaataattaagaaaaataagacgataagcatgatgacacttttcaaacaacctctatcagtttctttcgattttctttgttgaacctttttataatcttcaagtagttttgcggcttttttatttatatgtttattcatgatgttgactccttataatatatgtttaattcattaaaatagttgaaaacatgacttgaaataaagatataaagctaaagtaaggatgttcaattgtttcaaattttatgaaagtataacgttaaatatgttaatttgatgatgatatttgctttttattttccaaatggaatttacttaaactgatgcattaaaatattaatgaagcactagaatacataaatgaatagtaatggtgcacagtatagaataattaaggctatattaagtataaatatcgttaactgtaagctatctttagttttaatataaactattaggataatcgacgtaagaagaatcatatatattaatgatgaagaagtccatacaaaatccgcatcatttgttgttaataatgggactataattaatccgaaattaatcatgcatgctatatatactataatgttatacacaatgttaatttttgttcaccaccttatacttctattttaaaaacttctttataatgatatattgtttaatgttgaaataattagattatctaattttcatttgctttacatgtaaaaggctatatatagtatgctctttatgattctaaatgctttttaatatttaatgctcatcaacatttggattttgaatattcaattcaaaaactttattagctacgtcaattgtaaaatcagaaccatagttgacatgagctacttttaattttccatctaaataatagattgcgattgcaacatcgtaaaattcgtcaatgacaaataaactcttttcgtttgttacaacctcatgctctcctgagtatacaacgttaatttcccaatcattaaaaaccatttgttaacctccttgaacatttaaattgattcaacttaagtttaacttattcatacaacttcgtacaatatctagatgaacattaattgtatttctagaaatctttttcaattatatgtactaattatacttttaaatttcttatttcagtatagttttaaaacgattttaaaataattctgcaaatatattaacacataatgtgttcaaaaagttttgaacaatttcaaaacttttatataaagggtttgacaacatggaattcaaatttcttattttaaaaattacctcatatagtgtcatgtttagtctaatttttaagtcaggaaagcaaatcaagtagatagtttaaattaaaaatatcataagttaattaaactaaattcagtataaaaattagccgaaaaacatcatttctgaagttatcggctaaagttataaattatatttatttgtacatgaacaaataatttacattaatttgtcatttcttctttttcccaatcgattttatatctttctgaagaacgatctatccatttatctttagtattggtacctttccaatttgttgaagtccagtgcaattggtagtcatcacgaactcgttcgtatattacatctatatttgtttgttgtttggatgcttttctatccatagtaataactgtagcgaagtctggtgaaaaccctgaagataatagagaacttgctttgttaggatcaaggaagttatctgctgctttcatagagccatttctagttttcatgaaaagttgattgccatataccgggttccaagaatctctatcatatggtccccaattttgattcaccatattgttaaatatcactttccagcctacttttttatcagttgggctctctaaaattgttttgaaatcaggttgaacatatttcagtgtatgaccaatcgaaacatttgcaccaataaggccgccaatttttcctgtatcatcaccagtaacattaccgttgaatccataagttaaagtactcatatactcttttgtatcaatcgaatttcttggatagtaatcagatatttgagctacttcattatcaggtagttgcaactgtaccttaaaggctgaaggccaggctaaaccacttttgttagcaccttcttcgctataaactctatattgaccagcaatggtacctttcgttctaataactagcagttttttattatgatttttatcatcgataaaactataaaatacttttttgtgcatgccattttctttatcataagtgactaaatcacctgtttttactgtagtattgcttccaatatctgtagtaccggttttaatattaatatcagaatctgcggcattagcgacaggattcattaatatggaacctagcaatagtgttgttgttactgagctgactatacgtgttttcattttcatcatccttctattttttaaaacgatttgaggaaacaataatcaatatgtcaatttagaatattgcagttgagacatatcaaatatttataatcgtttatattagtatatttaatgtagcaactgataaattactgagtgatgatgagtgattattttaagaatatgtttttaacttttatttaaaatttgaaaggaagcatttcaatttcgagggttagtcaaagttgaataaattctttatgaaacaaggaaaagacatagctaattttattgattaatttctttaaaactaatgatttgtttgatttaaaaatgtaatcgattacaatataaaaatacaaatatcttagaattaaatcaattaattaactattaaataaaaattaactatatattaactagtgtaaattaataaatagaaatagagaaaaagggtattaattatgtttggaatttcgtcgggaataaattttgccattacatagaaatatctaatagataacgaaaaagtatcgtatgtatttttaatatagtgtaaaatattatatgtaaaataaaatgtaggtttttagttagaggcattataagaaaattttgagtataggttagcttttaattatgaatcttattgaaatttgattaataaaaatatgataggggattaaaatgaaactattttatatcgtatttcttattattatatggctgaatatatttttaggaaatgaaatcatccatacactgactgttttaataacaacattgtatattgttaattcaagaaaggggattaaaaatgacagagttgaataatattataaactctcttcaatctttgtttgagtctgaatcaggctataaaatttcgaaaaattcaggagttccatatcaaacagtacaagatttaagaaatgggaaaaccaaactagaagatgctagatttagaacgattattaaactttatagttactatgtctcattaaaagaacactaatcatgggacaataaagtattgctataataatttaatcattaaatgaaggaatagagcctaagacataataaatcaatgtcttaggctctacaatattatattggtagtagttgaccgaatgaaaatgcccatgtaacaagcatttttcaattataggcggggccccaacatagagaatttcaaaaagaaattctacagacaatgcaagttggcggggccccaacatagaagctggcggaaagtcagcttacaataatgtgcaagttggggagtgacaacgaaataaattttataaaatactatttctgtcacattcctactcccaattccatttaaatatatagaaaattttacctattatatacatcatacactttaaaaattatcatttaaataatctgatttggaattaaagtgcatgaagtataagtcaccttcatatactaatcaaagaggacgtcaacagttattttattaggatttttaacataaacatttgctagatctgaatgtaatcttttgcttaaatcaatagtgtagttattaccgccaccggtgatcttaagcttacctttattacgattttcgttatataatattttattttttattaacgcttctcgtgcacggaaatcgatttctttcaatgttaatactggtttattgccttggtatattttatgcgcaccaataatcgtttgtagtttatctttgtattgcacaaaaagattataagttttatcagaaggttttgcggctggtgtaacgccacctgtaaatgtctctctataagaccaccataactgatcagtatctttgtcttttagtccaaacacatctacgtaacgatcttttaactgattaatatttccccaactttcagcgccccataaagatatatgtgctgaccatgaatatctcttaagttcaacataaatgtttccattatcatattgatatagccatttatttgaaaatgaaaaatgaggctgtgtgtaatatttaattaattcattgatgttagtttcatcttgaccaatgctataagctttagcttcagagtaaaaactaaatactggtttttgattttgaggtaatacagtacctaatagtaataatgttgtcgttaaaattatatttttcgtgatgttcttactcattagaacatctcctttcagaggaatcatgatacgaggaataagaaatttaaatgtgagcgaagtcaatatagtatttgcgattatttttattaactccattattattgttagtttgatttttcgaggataacttcaatttttgcattttgaggttttttaacatatctatttgcatcagttgatggcaaccttttacttaaatctattgtgtagttattgtctgcacctgttattttaatttgtcctttattataagaattattatataattttttacttttaattaatgtttgacgaatacgaaaatctaattcttttaaagttaaaacaggcttattgccttcataaactggaaatccgccagtaaacgtttctgctttatctttatatgttacattcagtttatagtgtttatcgttagatgttgctgcaggagtaacaccaccagtaaacgtttcttgagataatgcaaaagaatcaatggtttcttggtcttttatgccaaaaatatcaacgcttttatttcttaattggttgatattgccccaactttcaggtccataaacttgaatatgactataccaagaaaactgtaacaacgttgcatgaatcgtaccgttatctttttgccataacgtactgttagagaaggttaaatatttttgcgagtaatatttagttaactcattaacgttagtttcgttttgatttatataataagctttcgcttcagatgaagaattgataggtgtattaggaaattgtgtagatgctgtacctaatagtaacaatgttgttgataaaataatttttttcgtgatgttattgttcattcgaatttctcctttgagtattgttggaatgtttaattataaaaaggggttaattagataattgaaattatccgcatttacaaaaggtaataggttagttagatttttcgagtatgacttcaatttctgcattacgaggatttttaacataacggtttgtgtcagttaattttaactttttacttaaatcaatcgtgtaattatttccatcagcagttatcttaatttgacctttattaaattctccgttatataactttttattttttattaatgtttgacgaatacggaaatctaattcttttaaagttaatactggtttatttcctttgtaaaattcatgtccaccgatgatagtttgttgtttatcactatattttaaaaatagtctataaggcttatcagatgaagtagctgctggcgtaacaccaccagtaaatgtttcatcataagtccagtaaccttcaactgtgtcctcatctttagttccaaatatatcaacgtatttatttcttaactgattaatgtttccccaactctcggatccaaacacttgaatatgactataccaaacccacgtttgcaatgttgcatgaatgctaccattgggcttttgccataaccattttccagataatgaaaaatgcggctgagtgtaatatttgattagttcattgatattagtctcgttttcactgatattataggcttttgcttcagatgaaaaactgattggtgttttaggaagttgtgttgatgtagtttctaaaagtaacaatgctgttgataaaactaatttattcatgatgttctttttcatatgaaaatctcctttgcgtgaattacccaaagtatataagctattacaccgattcggaattaaataaaagctaaaactatgttaaataaacttaaacagttagtagtgttatttaagcaaaacttatcatttttaagttttggacagaaacagtatctaataaagtaggcgggagttatatattaaaaacgatacgttagaattattctctaatcaattgtattaaattgtttgataattgaattttctaactacttgaaaaatagttatactttaaatgtagtacttattttaattatttcctactacttaaatttaatattaataaaatgttcatttaattattgataaaatattacaaattttaatagtaggttgtgtttattttgtatgcgcttacaatttaggtgtaactaaaataaaaggagttgttattaatgaaaaatttacgaaacagaagttttttaactttattagacttttcacgacaagaggtagaattcttattaacactctccgaggatttaaaacgtgctaaatatattggcactgaaaagcctatgttaaaaaataaaaatattgcactgttatttgaaaaagattctacaagaacgcgatgtgcatttgaagttgcagcgcatgatcaaggtgcaaatgtaacttatttaggcccaactggatcacaaatgggtaaaaaagaaacaactaaagatactgcacgtgtgcttggtggaatgtatgatggcattgaataccgtggtttttcacaaagaacagtagaaactttagctgagtattcaggcgtaccagtgtggaatggtttaactgatgaagatcatcctactcaagttcttgctgatttcttaacagcaaaagaagtcttaaaaaaagattatgcagatattaactttacatatgttggagatggtcgtaataacgttgcaaatgcattaatgcaaggtgctgccattatgggtatgaacttccatttagtttgtccaaaagaattaaatccaacagatgaattattaaatcgctgtaaaaatattgccgctgaaaatggtggcaacatattaatcacagatgatattgaccaaggtgtaaaaggttcggatgtaatttacactgatgtttgggtatcaatgggtgaacctgatgaagtatggaaagaacgacttgaattattgaaaccatatcaagtaaataaagaaataatggataaaactggtaatccaaatgttatttttgagcattgcttaccatctttccataatgctgatacgaaaataggtcaacaaatttttgaaaaatatggtattcgagaaatggaagttacagatgaagtattcgaaagtaaagcttcagttgtattccaagaagctgagaacagaatgcatacaatcaaagcagtcatggttgctacattgggtgaattttaaatgatataaggaagtgaatatgatggcgaaaatagtagtagcattaggtggtaatgctttaggaaaatcacctcaagaacaactcgagcttgttaaaaatactgcgaaatcattagtaggattaataacaaaaggacatgagattgttattagtcatggtaatggaccacaggttggaagcattaatttgggacttaactatgctgcagaacataaccaaggtccggcatttccatttgctgaatgtggcgcaatgagtcaagcttacatcggctatcaattacaagaaagcttacaaaatgaattgcattctattggaatggataaacaagtggtaacactagtgacacaagttgaagttgatgaaaatgatccggcatttaacaatccttcaaaaccaattgggttattttacaacaaagaagaagctgaacaaattcaaaaagaaaaaggatttatatttgttgaagatgctggaagaggatatagacgcgttgttccttcaccacaacccatctctattattgaattagagagtattaaaacacttattaaaaatgatacactcgttattgctgctggtggtggaggtataccagtaattagagagcaacatgatggttttaaaggtattgatgcagttatagacaaagataaaacaagtgcgttgttgggtgctaatattcaatgcgatcaattgattattttaacagcaattgattatgtatatattaattttaacactgaaaaccaacagcctttgaaaacaacaaatgttgatgaattaaaacgatatatagacgaaaatcaatttgcaaaaggaagtatgttaccaaaaattgaagcagccatatcatttattgaaaacaatccaaaaggaagtgtgcttataacatcattaaatgaattagatgctgccttagagggtaaagtaggtactgtgattaaaaagtaattgaattgaaacgcttttcaattactatatgtcaaatgcatgatttttattatttatgtgcaccccctgaaaataatgcctctattttgatgcggggtgcactttcttaatttatatttataaaatctttaaggtagaaatgctaggttaaatgtcgaaggagatgaaaccgtggaaaatacaattaatgaaagtgaaaagaaaaaacgatttaaattaaaaatgccaggtgcatttatgattttattcattttaacggttgttgcagttatagcaacatgggttattcctgctggtgcatattctaaactttcttacgaaccttcatcccaagaactaaagatagttaaccctcataaccaagtgaaaaaggttccgggtacgcaacaggaactagacaaaatgggggttaaaattaagattgaacaatttaaatcaggtgcaattaataagccggtatcaattccgaatacttatgaaagattaaagcaacatccagctggaccagaacaaataacaagtagcatggttgaaggtacgatagaagcggtcgatatcatggtattcattcttgtactagggggacttattggcgtagttcaagccagtggttcttttgaatcgggattgttagctttaacgaagaaaacaaaagggcatgaatttatgctaattgtgtttgtatcaatactaatgattatcggcgggacattatgtggtattgaagaagaagctgtagcattttatccgattttagtccctatatttatagcgttaggatacgattctatcgtttcagttggtgccatattccttgccagctctgtcggtagtacattttcaactattaacccgttctcggttgtaattgcctctaatgccgctggtacaacttttacggatggcttgtattggagaataggtgcttgtattgtcggtgcgatttttgttattagttatttatattggtactgtaaaaaaattaaaaacgatcctaaagcgtcatattcttatgaagacaaagatgcttttgaacagcaatggtctgtattaaaagatgacgatagtgcccattttactttgcgtaagaagataatccttacattatttgtactaccatttccaattatggtatggggagttatgacgcaaggttggtggttcccagttatggcttcagcatttttaatatttacaattataataatgtttattgctgggacaggtaaatctggattgggagaaaaaggaactgtagatgcatttgtcaatggtgcatcaagtttagtaggtgtatctttaattattggtttagctcgaggtattaatttagtgttgaatgaaggtatgatttcagatacaatcttacacttttcatcatctttagttcaacatatgagtggaccattatttatcatcgtattactatttattttcttctgtttaggttttatcgtgccatcatcttctggcttagcggtattatcaatgcctatctttgcaccactagctgatacagtaggtataccaagattcgtcatcgttacgacatatcaatttggtcaatatgcgatgttattcttagcgccgactggacttgttatggccacactacaaatgttaaacatgcgatattcacattggttccgatttgtatggccggtagttgcttttgtattgattttcggtggcggagtactaattacgcaagtactaatttattcataatttgaaatgctatattataaaaaatactaatggggttttatgcatctcgtaggtttgtagaaatactaaactaagcgaggtgcattattatttttgattaagaaaataatgacggtaatgataacactagtaagtaattgatacaatgctctatttaataatgatatttttaaaatttgtttttaatgtaatgttagatctatggtatattatatttatcgtggtaaatatgtatttgctgtaaacagtttttgtaacacatgatacatatggttgtgaaaatagcatatataaaggatggctataaatgacacatttgacaaaggttttagatacactaactggaatatgcgtagtattattatttagtaaatattttgtggcgtatgcaaatatggtgtttgattggaatttaagatggtatttgctagaaaacataccacatttgccaattatattatttattctgatgtttattttcggagtaccttctgaaatgataaaagataggcaaaggaaaaataacggtgtttaatttatcgatatttagaggtgataaaatttgtcaactattacaaagactaaaataaaaatctttattaattattttattggtatattagccttggcgtttgctgcttatatattatttaaataaaggttagagtgaaacgtgtttatgaactagacgttctagtatagttactacagctttagtcagaaggtatcattgataagatcatattaaatcaaagaggcattgatatacactaaaaagaggcaagattacctgcctctttttagttattaaatatacgtgttaattcttggtaatagtgttactgagacgcattacgaagaaatttatcttgtttttccttttttaaaaagaagtgaagatatcctataaagactctaagtactattacagtggctaataacacttcgataaacaaaagacctttccaaatgtctggaaacataagtacaggcaaactgttctttaaagcagttgctgagattactaaagggaatgtgaaagctgaaaatacgggcgaaaaaggttcttttagtaatttaggcaattgtataatgatataaaaataaaatatttgagctaatagtaaaaatataattacgataaaagcattcgccttaggaaaagctataacatatgctgcagcgactaaagaaaatggtgcacaaattgtcgatgtgttcggtttgattgacgtctgcaatggaaatgcttttaatcgcttgaaaactataggtaagacaatacaagtagctacaaagccatatattactgttaattgacctatgaaaaaatatccgctaacgggtgccgtcaatcctgcgatagcaataccaataaaaagtacagtccacgaaggataaacattttcaagtgaaaaatcttttaaatattttattgaaaaaataatcatatgcgtcataattcccacaaggcataaaatccaaataggcgttattaagctattgataaaagttatgttactaaaaaatgtatttaaataagtagtacctaaaaagccagacatgaaaaatgttgtgaacactgatgaaactagaggactgtttaattgttctttcacattattaaaatatttgatcatagtacataaaaggtgaatccaaatcaagaaagcaaagattccgcaaacagcgtttaaagtaagagataagtcttttaatagattacccaggcctaataatcctaagactagtcctgacgttactagaggtgctttttgaagtctcatgatttacaacctttcttatgtgattttcttcactaattatatcatgatagctatggccaattaataagaagagtgtgtactattacgttattagagtatgtatattggattgatagacacataattgacatttaaatctcaaaattaatgatatttgaggtatgctttgcaacctaaatattggaatatgtggaaaagtaattatttaatttaaatgatgattgaagatttacaagggggtgtacaaaatgagaaatcaaattcaaaaactattagacagtgatttgagcagtttacatatatcgaaacaaacaggagttccacaaagcacaatacacagaatgagaaaaaatgaaagatcattagacaatatgtcattgaaaaacgctgaactactttataaatttgccaatagtatatttagcaatgaaaattaagaagaataattagtgagttaaataattaaaaaaccacgtctcgatggacgtggttattttttttagatgtatataattataattataggatttcgggcccctgaaaagtccctaaaattttgaatagtatcaaaatctataggaataatataataataaaaatctctacgcatgcaaatggtgagtgttaaaaatcttggtgtagtgttggtgtagttcaggtgcagtatagatgaaatttgagcacaaaattacttaattaaaaatgtataaacaagtgtcagacgcgtgtcaattgtgtgtcaaaaaattctataacgaataagcatgcttgttttaattactgtattttcggggcttatgcgggggacgttttggtgacgcatcatactatattactgaaattcaaaacaaaaagagccccgtaatcacggaactcttttgtttggtaatgcgtataaaaatacctataaacgtcctgggagggattcgaacccccgaccgatggcttagaaggccattgctctatccagctgagctaccaggacacgtttaacaacacaagaattattatatctaaatgaacttaaattagcaataccttgtaaataaaaaatgtttatatttttcactattatagagctatttatctaaaaaggttcaataagacttaaatacgaattcaggcaacttaattgtgttaaatacagttttgaatgcctaactgtatttcttttctctttaaaatacagttaagtacattataagatgttgtgcggataaacaaactaattgcatcaaatttattttaaaataacaacaacaaaacgttaagcgaataacatttcggtgatttaaaagctacgcacgtttttgttatcttcaaatttaaattttaaggagtgttttcaatggaaggtttatttaacgcaattaaagataccgtaactgcagcaattaataatgatggcgcaaaattaggcacaagcattgtgagcatcgttgaaaatggcgtaggtttattaggtaaattattcggattctaatttcaatatgttatgtaagtaatcagtattatttcaaaggtgagggagagatttaaatgactggactagcagaagcaatcgcaaatactgtgcaagctgcacaacaacatgatagtgtgaaattaggcacaagtatcgtagacatcgttgctaacggtgtgggtttactaggtaaattatttggattctaatataataactaatattctttaaaataaactgggtgagcatactttaatgttatgcactcagtttattttatttgcagaaatttgagcctctgttaagatttagatacatagacaatataggagatggggaaattgggatataaaaatattttgatagactttgatgatacaattgttgatttttatgatgcagaagaatgggcgtttcactatatggcgaatgtttttaatcataaagcaacaaaggatgattttttaacatttaaaaaaatcaatcaccaacattgggaagcttttcaacaaaataaattaacgaagtctgaagtattatcagaacgatttgtgaattacttcaaacatcatcaaatggaagttgatgggcatcgtgcagatgtgttatttagaaatggattagcagaagctaaagttaaatactttgatcaaacattagaaacaattgtcgaattatcgaaaagacatgatttatatattgttactaatggtgtaaccgaaacgcaaaagagaaggttaaatcagacgccgttgcataaatatattaaaaagatatttatatctgaagaaacaggatatcaaaaacctaatccggaattttttaattatgtttttaatgatattggtgaggatgaaagacagcactcgattatagttggagattctttaacatctgacattctaggtggaatcaatgcgggtatagctacttgctggtttaattttagaggatttgatcataatccaggaattatacctgattatgaaattaattcatggaaacaactaaatgatattgtacgttaagacaaataatttgaaaatgatttacttatattagcttaagaaagtaattgtaaaaaagacactacgaaaagatgcattttcatgctcgtagtgtcgaatattattatcttatggtttccacaataagacatcatgtccctctatatttttagcttccacatctgtaaatccatgatgtaaaaagaaatccttagaatcatttctgccaatggctttaattggcatattgaaactctttgcaaaatcaatcaattctgaagcgtaccctctgttttgatattttggtaatacttctaacttccataataatatataatcttcaaaatctgggaagtagatttcttcgacatcacctttttttagtaatgccattctagctcctaattgatctccgacaaatatgccataaaatggtgaatctgaacttgcatcaatcatttgaccgtttaactcattgaccatgtataagtctttgttgccaaacgctctaaagttttcgaataattcgtcagttttgtaattaatttcaagacgtttgatttcactcatatttatctaccccttatttgtttactactattattatacattaaaccacttgtgtttttcattgatttgaaaatgtaaaacaatgaatattataaattttccatgattaaattgattttcaagccgtaaaattgtcaatcaccggtatagactttatactatagtttgtaatcgcgtacttaaggagaaaaaacatggactgtaaagtagttagtttaaatgaaaaagatcagtttataccaaaaataaagagcagtgaccctgtaataacaggattatttcaatatgatgcagctcaacaaactagttttgaaaaaaggatgtctaaagaaaataatggaagagaagcggcattagcgaatgttattcgtgaatatatgagtgatttaaagctttcaagctttcaagtgaacaagaattaaacatacaacatttagctaatggttcaaaagttgtgattggtggacaacaagcagggcttttcgggggaccattgtatacattccataaaatattttcaatcattactttatctaaggaattaacggatacacataagcaacaagtagtaccagttttttggattgcaggagaagatcatgatttcgatgaagtgaatcatacatttgtttataacgaaaatcatgggtcgctgcataaggttaaatatcatacaatggagatgccagagacgactgtctctagatattatcctgataaggctgagttgaaacaaactttaaaaacgatgttcattcatatgaaagaaactgttcatacacaaggtctactggagatttgtgacagaattattgaccaatatgactcgtggactgatatgtttaaagcactactgcatgaaacatttaaagcatatggcgttctatttatagatgcgcagtttgagccgttaagaaaaatggaagcgcctatgtttaaaaagattttgaaaaaacatcagttgcttgatgatgcttttagagcaacacaacaacgtactcaaaatcaaggcttgaatgcgatgatacaaacagatacaaatgttcatttattcttacatgatgaaaatatgcgtcaattagtttcgtatgatggtaagcattttaaattaaataaaacagataagacatatataaaggaagaaattataaatattgcggaaaatcaacctgaattattttctaataatgtagtgacaagaccattaatggaagaatggttatttaacacggtggcatttgttggaggaccgagtgaaattaagtactgggctgaactaaaagatgtatttgaactatttgatgttgaaatgcctatcgtgatgccaaggcttagaattacttatttaaatgaccgtatagaaaaattactttcgaaatacaatattccattagaaaaagtgttagtcgatggtgttgaaggagaaagaagtaagtttattagagaacaagcatcacatcaatttattgaaaaggtagaaggtatgattgaacaacagcgtcgtctaaacaaagacttattagatgaagtggcggggaatcaaaataatattaaccttgtgaataaaaataatgaaattcatatacaacagtatgattatttgttaaaacgttatcttttaaacattgaaagagaaaacgacatcagtatgaagcaatttagagaaattcaagaaacactccatccaatgggaggattacaagaaagaatatggaatccacttcaaattttgaatgattttgggacagatgtgttcaagccctccacctatccaccactttcttacacttttgatcatattattataaaaccttaatataccaagggtttagcccgatttatcttaatgataaatcgggcatttttttgttttttaaaataaatttcacaaattttgtataaatagtggtggatagtggggagatgtggtaaattatatataaggtgaggtgataaaaaatgttcatgggagaatacgatcatcaattagatacaaaaggacgtatgattataccgtccaagtttcgttatgacttaaatgagcgttttattatcacaagaggccttgataaatgtttattcggttacactctagacgaatggcaacagattgaagagaaaatgaaaaccttacctatgacaaaaaaagacgcacgtaagtttatgcgtatgttcttctctggtgctgttgaagtagaacttgataagcaagggcgtattaacatccctcaaaacttgaggaaatacgctaatttaactaaagaatgtacagtaatcggtgtttcaaatcgtattgagatttgggatagagaaacttggaatgatttctatgaagaatctgaagaaagtttcgaagatattgctgaagatttaatagattttgatttttaaaatggaggaattgaagtgtttcatcatatcagcgttatgttaaacgaaaccattgattatttaaatgtaaaagaaaatggtgtgtacattgactgtacgctaggtggagcgggacatgccctttatttactaaatcaattaaatgacgacggaagattaatagcaatcgatcaagaccaaactgcaattgataatgctaaagaggtattaaaggatcatttgcataaggtgacttttgttcatagcaacttccgtgaattaactcaaatattaaaagacttaaacattgaaaaagtagatggaatttattacgacttgggtgtttcaagcccacaactcgacattccagaacgaggattcagttatcaccatgacgcaacattagacatgcgtatggaccaaacacaagaactaacagcatatgaaattgttaacaattggtcatatgaagcgttagtgaagattttttatcgctatggcgaggagaaattttcaaaacagatagctcgaagaatcgaagcacatcgcgaacaacaaccaataacaacaacattagaattagttgacattataaaagaaggtattcctgcaaaagcaagaagaaaaggcggacatcctgcaaaacgagtatttcaagcactacgaattgcagtaaacgatgaattgtcagcttttgaagattcaatagaacaagcgattgaattagtgaaagtagatggcaggatttcggtaatcactttccattctttagaagatcgtttatgtaaacaggtgttccaagaatatgaaaaaggtccagaggtaccaagaggattaccagttataccagaagcatatacacctaagttaaagcgtgttaatcgtaaaccgattaccgctacagaagaagatttagatgacaataacagagcacgaagcgcgaaattacgtgtagctgaaatacttaaataaggagcaatttataatggctgtagaaaaagtgtaccaaccatatgacgaacaagtttataatagtataccgaagcaacaaccacaaactaagcccgaaaagaagactgtttcgagaaaagtggttgtacaattaactaaatttgaaaaagttttatacataactttgattactgtaattgctatgttaagtatttatatgctatctttaaaaatggatgcgtatgatacgcgaggaaagattgcagatttagattataaaatagataaacaatcaagtgaaaacagtgctttacaatctgaaatcaaaaagaattcttcttatgaacgcatatacgaaaaggctaagaaacaggggatgagccttgagaacgataatgtaaaggtagtgcgtagtaatggcgaagcaaaaaattaaaattaaaaaaaataaaataggggcagtcctacttgttggtttattcggactgctcttttttatattggttttaagaatttcatatatcatgattactggacattctaatggtcaagatttagtcatgaaggcaaatgaaaagtatttagttaagaatgcacaacaaccagaacgaggaaagatatatgatcgtaatggtaaagtgctagcagaagatgtagaaagatataaacttgttgcagtaatagataaaaaggcgagtgccaattctaaaaaacctaggcatgtagttgataaaaaagagactgcaaagaaattatctacagtcattaatatgaagccagaggaaattgaaaagagacttagtcaaaagaaagctttccaaattgaatttggacgcaaaggaacaaatttaacgtatcaggacaaattgaaaatagagaaaatgaatttgcctggtatttctttattgcctgaaacagaacgcttttatccaaatggcaattttgcatcacacttaattggtagagctcagaaaaatccggatactggtgaacttaaaggtgcacttggagttgaaaagatttttgatagttatttaagtggatctaaaggatcattgagatatattcatgatatttggggatatatcgcaccaaatactaaaaaagagaagcagcctaaacgtggtgatgatgtccatttaacaatcgattcaaatattcaagtatttgttgaagaagctttagatggcatggttgaaagataccagccgaaagatttatttgcggttgtcatggatgccaaaactggagaaattttagcatacagtcagcgaccaacatttaatcctgaaactggtaaagactttggtaaaaagtgggcaaatgacctttatcaaaacacatacgagcctggatcaacatttaaatcatatgggttagcagctgctattcaagaaggtgcttttgatcctgataagaaatataaatctggacatagagatattatgggttcacgtatttcagactggaatagagtcggttggggtgaaatcccaatgtcactcggatttacttattcatctaatacattgatgatgcatttacaagatttagttggtgcagacaaaatgaaatcttggtatgaacgatttggatttggaaaatcaactaaaggtatgtttgatggagaagcacctggtcaaattggatggagtaatgagttgcaacaaaaaacgtcatcatttggtcaatcgacaacagtaacacctgttcaaatgttacaagcgcaatcagcgttctttaatgatggtaatatgttaaaaccatggtttgtgaatagcgttgaaaatcctgttagtaaaagacaattttataaagggcaaaaacaaatcgcaggcaaaccaataacaaaagatactgctgaaaaagttgaaaagcaattggatttagttgtgaatagtaagaagagtcacgctgcaaactatcgtattgatggttatgaggtcgaaggtaagactggtacagcacaagtcgctgcacctaatggtggtggatacgttaaaggtccaaacccatattttgtaagttttatgggtgacgcgccgaagaaaaatcctaaagttattgtatacgctggtatgagcttggcacaaaaaaatgaccaagaagcttatgaattaggtgttagtaaagcgtttaaaccaataatggaaaatactttgaaatatttaaatgtaggtaaatcaaaagatgacacatctaatgcagagtatagtaaagtgccagatgttgaaggtcaagacaaacaaaaagctattgataatgtgagtgcaaaatcattagaaccagttactattggttctggcacacaaataaaagcacaatctataaaagcagggaataaagtcttacctcatagtaaagtactgttattaacagatggagacttaactatgcctgacatgtcaggatggacgaaagaagatgtcattgcttttgaaaacctaacaaatattaaagtaaatttaaaaggtagcggttttgtgtcccaccaatcaattagtaagggacaaaaacttactgaaaaagataaaatagacgtagaattttcatcagagaatgtagacagcaattcgacgaataattctgattcaaattcagatgataagaagaaatctgacagtaaaactgacaaggataagtcggactaacaagaatggctacattaaattaggatgtattgtcactatttgtttttactaaagtaatgctgtgatagaaaacaacatcttcatttaatctttataaataagtgttgatagagaattttaaggtagacgaggtcagattaacttgtttgttataggcaaactttttatactggcctcttatgccgtaaaaaagaaaaattataaattttgattacaactttgtttatttaattgaaaaattgataatatattagtggttaaaaaagtctggattaagaagaggagatagttatgatttttgtatatgcgttattagcgctagtgattacatttgttttggtacctgttttaatacctacattaaaaaggatgaaatttggtcaaagtattcgagaagaaggtccacaaagccatatgaagaagactggtacaccaacgatgggtggactaacatttctattaagtattgtgataacgtctttggtggctattatatttgtagatcaagctaatccaatcatactgttattatttgtgacgattggttttgggttaattggttttatagatgattatattattgttgttaaaaagaataaccaaggtttaacaagtaaacagaagtttttggcgcaaattggtattgcgattatattctttgttttaagtaatgtgtttcatttggtgaatttttctacgagcatacatattccatttacgaatgtagcaatcccactatcatttgcatatgttattttcattgttttttggcaagtaggtttttctaatgcagtaaatttaacagatggtttagatggattagcaactggactgtcaattatcggatttacaatgtatgccatcatgagctttgtgttaggagaaacggcaattggtattttctgtatcattatgttgtttgcacttttaggatttttaccatataacattaaccctgctaaagtgtttatgggagatacaggtagcttagctttaggtggtatatttgctaccatttcaatcatgcttaatcaggaattatcattaatttttataggtttagtattcgtaattgaaacattatctgttatgttacaagtcgctagctttaaattgactggaaagcgtatatttaaaatgagtccgattcatcatcattttgaattgataggatggagcgaatggaaagtagttacagtattttgggctgttggtctgatttcaggtttaatcggtttatggattggagtgcattaagatgcttaattatacagggttagaaaataaaaatgtattagttgtcggtttggcaaaaagtggttatgaagcagctaaattattaagtaaattaggtgcgaatgtaactgtcaatgatggaaaagacttatcacaagatgctcatgcaaaagatttagaatctatgggcatttctgttgtaagtggaagtcatccattaacgttgcttgataataatccaataattgttaaaaatcctggaataccttatacagtatctattattgatgaagcagtgaaacgaggtttgaaaattttaacagaagttgagttaagttatctaatctctgaagcaccaatcatagctgtaacgggtacaaatggtaaaacgacagttacttctctaattggagatatgtttaaaaaaagtcgcttaactggaagattatccggcaatattggttatgttgcatctaaagtagcacaagaagtaaagcctacagattatttagttacagagttgtcgtcattccagttacttggaatcgaaaagtataaaccacacattgctataattactaacatttattcggcgcatctagattaccatgaaaatttagaaaactatcaaaatgctaaaaagcaaatatataaaaatcaaacggaagaggattatttgatttgtaattatcatcaaagacaagtgatagagtcggaagaattaaaagctaagacattgtatttctcaactcaacaagaagttgatggtatttatattaaagatggttttatcgtttataaaggtgttcgtattattaacactgaagatctagtattgcctggtgaacataatttagaaaatatattagcagctgtgcttgcttgtattttagctggtgtacctattaaagcaattattgatagtttaactacattttcaggaatagagcatagattgcaatatgttggtactaatagaactaataaatattataatgattccaaagcaacaaacacgctagcaacacagtttgccttaaattcatttaatcaaccaatcatttggttatgtggtggtttggatcgagggaatgaatttgacgaactcattccttatatggaaaatgttcgcgcgatggttgtattcggacaaacgaaagctaagtttgctaaactaggtaatagtcaagggaaatcggtcattgaagcgaacaatgtcgaagacgctgttgataaagtacaagatattatagaaccaaatgatgttgtattattgtcacctgcttgtgcgagttgggatcaatatagtacttttgaagagcgtggagagaaatttattgaaagattccgtgcccatttaccatcttattaaagggtgtgagtattgatggatgataaaacgaagaacgatcaacaagaatcaaatgaagataaagatgaattagaattatttacgaggaatacatctaagaaaagacggcaaagaaaaagatcaaaggctacacatttttctaatcaaaataaagatgatacatctcaacaagctgattttgatgaagaaatttacttgataaataaagacttcaaaaaagaagaaagcaatgataaaaataatgattctgcttctagtcatgcgaatgataataatatcgatgattctacagactctaatattgaaaatgaggattatagatataatcaagaaattgacgaccaaaatgaatcgaatgtaatttcagtcgacaacgaacaacctcaatcagctcctaaagaacaaaatagcgactcgattgatgaggaaacagtaacgaaaaaagaacgaaaaagtaaagtaacacaattaaagccattaacacttgaagaaaagcggaagttaagacgtaagcgacaaaagcgaatccaatacagtgttattacaatattggtattgttgattgctgttatattaatttacatgttttcaccacttagtaaaattgcgcatgtaaatataaatggaaataatcacgttagtacttcaaagataaacaaagttttaggtgttaaaaatgattcaaggatgtatacgtttagtaaaaaaaatgctattaatgatctcgaagagaatccattaatcaaaagtgttgagatacacaagcaattaccaaacacattaaacgtagatatcacagaaaatgaaattattgctttagtgaaatataaaggtaaatatttacctttattagaaaatggtaaattgcttaaaggttcaaatgatgtcaaaattaatgatgcacctgtcatggatggtttcaaaggtacaaaagaagatgatatgattaaggcgttatctgaaatgacacctgaagttagacgatatattgccgaagtgacatacgccccaagtaaaaacaaacaaagcagaattgaattgtttacgacagatggacttcaagtaatcggtgatatttcgacgatatctaagaaaatgaaatattatccgcagatgtcacaatcattatcaagggatagttcgggtaaactaaaaacacgaggctatattgatttatcagtcggtgcttcatttatcccataccgtggaaacacgtctagtcaatcagaaagcgataaaaatgtgactaaatcatctcaagaggaaaatcaagcaaaagaagaattacaaagcgttttaaacaaaattaacaaacaatcaagtaagaataattaaaaaattttgatattgtctatgtttatagttcacaagccattcaacgtattgtaaactaaggatagtgtatttttttaatagtaatttgtcaggaggtgcctatctatggaagaacattactacgtaagtattgatattggatcatcaagcgtaaaaacaatagtaggcgagaaatttcacaatggtataaatgtgataggtacaggacaaacctacacgagcggtataaaaaatggtttaattgatgattttgatattgcgcgacaagcaatcaaagacacaattaaaaaggcatcaatcgcttcgggtgttgatattaaagaagttttcctgaaattacctatcattggaacggaagtttatgatgaatcaaatgaaatcgacttttatgaggatacagaaatcaacggttcacatatcgaaaaagtattagaaggtattagagaaaaaaatgatgtgcaagaaacagaagtaattaatgtgttcccgattcgttttatagtcgataaagaaaatgaggtttcagaccctaaagaattaattgccagacattcattaaaggttgaagcaggcgtaattgctattcaaaaatcgattttaattaatatgattaaatgcgtagaagcatgtggtgttgatgtattagatgtttactctgatgcatataactatggttcaatcctaacagctactgaaaaagagttaggtgcatgtgtcattgatattggtgaagacgttacgcaagttgctttttatgaacgcggtgaattagtagatgctgattctatcgaaatggcagggcgtgatattacagacgatattgcacaaggattaaacacttcttatgaaactgctgaaaaagttaaacaccaatatggtcatgcattctatgattctgcttcagatcaagatatcttcactgttgaacaggttgatagtgatgaaacagtacagtatactcaaaaagatttgagtgactttattgaagcgcgtgtagaagaaatattcttcgaagtatttgatgttttacaagatttaggattaacaaaagtaaatggtgggtttattgtaactggtggatctgcaaacttacttggcgtaaaagaattattatcagatatggtaagtgaaaaagttagaattcacacgccatcacaaatgggaattagaaaacctgaattttcttcagcaatttctacaatttctagtagtatcgcttttgatgagttattagattatgttacaattaattatcatgataatgaagaaactgaagaagatgttattgatgtgaaagacaaagataacgaatctaaattaggcggatttgattggtttaaacgtaaaacaaacaaaaaagatactcatgaaaatgaagtagagtcaacagatgaagaaatttatcaatcagaagataatcatcaggaacataaacagaatcatgaacatgttcaagacaaagataaagataaagaagaaagtaaattcaaaaaactaatgaaatctctatttgaatgattattggccaataaaactaggaggaaatttaaatgttagaatttgaacaaggatttaatcatttagcgactttaaaggtcattggtgtaggtggtggcggtaacaacgccgtaaaccgaatgattgaccacggaatgaataatgttgaatttatcgctatcaacacagacggtcaagctttaaacttatctaaagctgaatctaaaatccaaatcggtgaaaaattaacacgtggtttaggagcaggagctaatcctgaaatcggtaaaaaagctgcagaggaatctcgtgaacaaattgaagatgcaatccaaggtgcagacatggtatttgttacttctggtatgggtggcggaactggtactggtgcagcaccagtcgttgctaaaattgcaaaagaaatgggcgcattaactgttggtgttgtaactcgtccatttagttttgaaggacgtaaacgtcaaactcaagctgctgctggagtagaagctatgaaagctgcagtagatacattaatcgttataccaaatgaccgtttattagatatcgttgacaaatctacgccaatgatggaagcatttaaagaagctgacaacgtgttacgccaaggtgtacaaggtatctcagacttaatcgctgtttctggtgaagtaaacttagactttgcagacgttaagacaattatgtctaaccaaggttctgcattaatgggtattggtgtttcttctggtgaaaatagagcggtagaagctgctaaaaaagcaatctcttctccattacttgaaacatctatcgttggtgcacaaggtgtgcttatgaatattactggtggcgagtcattgtcattatttgaagcacaagaggctgctgatattgtccaagatgctgcagatgaagacgttaatatgattttcggtacagttattaatcctgaattacaagatgagattgttgtaacagttattgcaactggttttgatgacaaaccaacatcacatggtcgtaaatctggtagcactggattcggaacaagcgtaaatacttctagcaatgcaacttctaaagatgaatcattcacttcaaattcatcaaatgcacaagcaactgatagtgtaagtgaaagaacacatacaactaaagaagatgatattcctagcttcattagaaatagagaagaaagacgttcaagaagaacaagacgttaatcggttaatatatatacacaaataattcaacacaaatcatcagataacatatctgatgatttttttactaatttttagaacatgtagaaggacatttaagtttttcaaagttattaaaagtgtttaagtatcgtgtgaaaattaagtcaaaaattatttgcgcaacattttaactttaaacataaatgttatattatataattattaactttgtacagttagacgaagataatttaaatgaaatgatggtgacgatcgagtgaatgataattttaaaaagcaaccgcatcatttaatatatgaagagttattacaacaaggtattactctaggtattacaactagaggagatggtttaagtgactatcctaaaaatgcttttaatatggcgagatatattgatgatcgcccatataatattactcaacatcaattgcaattagctgaagaaattgcgtttgatagaaaaaattgggtgtttcccattcaaacacatgaaaataaagtcgcttgtattacaaaggatgatataggcacaaatatagacactttaactgatgcgcttcatggtattgatgcgatgtacacatatgatagtaatgtcttattaacgatgtgttatgcagactgtgtaccagtatatttttatagtacaaaacatcattttattgcattggcgcatgcaggttggcgtggtacctatactgaaattgtaaaagaagtgctaaaacatgtgaactttgatttgaaagacttacatgtcgttattggaccatctacatcatcaagttatgaaattaatgatgatattaaaaataaatttgaaacattgccaattgatagtgccaactatattgaaactagaggacgagatcgtcatggtattgatttgaaaaaagccaatgctgcattattaatttattatggtgttcctaaagaaaatatttatacgacagcgtatgctacatctgaacatttagaattatttttctcttatcgattagaaaaaggtcaaacaggacgcatgttagcattcattggtcaacagtaaacaaggaggagatatgtttgcgtgtgaaagataatttacaacaaatctcaacacaaattaatgacaaaagtgaaaaaaataatttttcaacaaaaccaaacgtgattgcagttacaaaatatgttacaatagagcgagctaaagaagcgtatgaggctggaataagacattttggtgagaatagattggaaggcttttttcaaaagaaagaagcattaccatcagatgcggtgatccattttataggatcattacaatctcgaaaagttaaggacgttataaacgacgtagattatttccatgctttagatcgattgagcttagccaaagaaattaacaaacgtgcagaacataaaattaaatgtttcttgcaagtgaacgtttcgggagaagcttctaaacatggtattgctttagaagatgttgatcagtttatagatgatcttaaaaaatatgacaaaatcgaaattgtaggtttaatgacgatggcaccattgacagatgatgaagcatatattagatcgttatttaaacagttacgtttgaaaaaagaagaaatacaacgactcaatttagaatatgcgccttgtgatgaattatcaatgggaatgagtaatgactatcttattgcagttgaagaaggtgcgacgtttgttagaattgggactaaacttgtaggagaagaggagtgagccacttggctttaaaagatttatttagtggattttttgtaatagatgatgaagaggaagtagaagtacctgacaaacaacaacaggtaaatgaagcgccagcaaaagagcagtcacaacaaacaacaaaacaaaacgcaatcaaatcagtccctcaaaaatctgcatcaagatatacaacaacgtcagaagaaaggaataaccgtatgtctaattattcaaaaaataattcacgtaatgttgtaactatgaacaatgctacaccaaacaatgcatcacaagaaagttcaaaaatgtgtttattcgaaccacgtgttttttcagatacacaagatattgctgatgagcttaaaaaccgccgtgcgacacttgtcaatttacaacgtattgataaagtatcagcgaaaagaattattgattttttaagcggtactgtttatgcaatcggtggagatatccaacgtgtaggtactgatattttcttatgtacgcctgataatgtggaagtagctggaagcattacagaccatattgaaaatatggaacattcattcgactaaggagttaacatatggatataaatgtgctagctacaatatttaaattcatcctttttgttgttgaaatttattatttcggcatgattatatatttctttacatcttgggtaccaagtattagagaaactaaggtaggttattttttagcgaaaatatatgaacctttcttacaaccatttagaaaagtaattccacctattggaattatcgacatatcatcaatcgctgcaattatcgttttagtattattccaaaaagggttactccaaatctttaattggattttaattcaattacaataaattaagcgacataacgaggcaagggtacatgatactttagcctcgtttttgatatgtatttttctgaatataagggcaatagatggtattttataatttttttaaggtagtgattaacatagatatttatcaacactttagacaggaagaatacgaattaattgatcagctaacggataaatgtgatcaagcggaacagcattatgcaccagtattaacgcattttttagatccaagagggcaatatatattggaagtgatttgtggcagttatgaagatttaaacgtatctttttatggtggacctaatgctgaaagaaaaagagcaatcatttcgccgaactattatgaacctaaagaaagcgactttgaattaactttaatggaaatagattatcctgaaaaattcgtcactttaaaacatcaacatattttagggacattaatgtctttaggtatcgaacgcgaacaagttggagatataattgtgaatgaacgaattcaatttgttttgacaagtagattggaatcatttattatgttagaattacaacgtattaaaggcgcatcagttaaactttatactattccagtaacagatatgatacaatctaatgagaattggaaaaatgaaagtgcaacagttagttctttaaggttagatgttgttattaaagaaatgatacgtaaatcacgtacgattgcgaaacaactaatcgaaaaaaaacgtgttaaagtgaatcacactattgttgattcagcagattttcaattacaagcaaatgatttaatatccatccaaggttttggtagagcacacattactgacttaggtggtaaaactaaaaaagataaaacgcacattacctatagaacattattcaaatagtaatgatttaaggaggataacaaatgccttttacaccaaatgaaattaagaataaagagttttcacgtgtaaagaatggtttagaacctactgaagttgctaattttttggagcaactaagcactgaaattgaacgtcttaaagaagataaaaaacaacttgaaaaagtaatcgaagagagagatactaatattaagtcttatcaagacgtgcatcaatctgtaagtgatgctttgatacaagctcaaaaagctggtgaagaaactaagcaagctgcagagaaacaagctgaagcgattatagctaaggcagaagcgcaagctaatcaaatggttggtgacgcggtagaaaaagcacgccgtttagcattccagactgaagatatgaaacgtcaatcaaaagtatttagatcgcgtttccgtatgttagttgaagcgcaattagacttattaaaaaacgaagattgggattacttgttgaattatgatttagacgctgaacaagtgacgcttgaaaatattcatcatttgcatgaaaatgatttaaagccagatgaagttgcagcaaatgcacaaaataatgcatcaaatacaccagacaataatcaacaatccaatgattcagaaacaactaagaagtaagaattaaataaagacagacgcgtaatatacatttaacttttcacagcgaattaggtaatggtgagagcctagtaaaagcatgtatgttatatcactggctttttaatatttaaataatgtaatgagagaactctaagttgagttaataagggtggtaccgcgagcaatcgtcccttttaatttaacttagagttttttaaatttttaaggagtgaaaaaaatggattacaaagaaacgttattaatgcctaaaacagatttcccaatgcgaggtggtttaccaaacaaggaaccgcaaattcaagaaaaatgggatgcagaagatcaataccataaagcgttagaaaaaaataaaggtaacgaaacattcattttacatgatggcccaccatacgcgaatggtaacttacatatgggacatgccttgaacaaaattttaaaagactttattgtacgttataaaactatgcaagggttctatgcaccatacgtaccaggttgggatacacatggtttaccaattgaacaagcattaacgaaaaaaggtgttgaccgaaagaaaatgtcaacagctgaattccgtgagaaatgtaaagaatttgctttagaacaaattgaattacagaaaaaagattttagacgtttaggtgttcgtggtgactttaatgatccatatattacattaaaacctgaatacgaagctgcacaaattcgtatttttggagaaatggcagataaaggtttaatttataaaggtaaaaagccagtttattggtctccttcaagtgagtcttcattagcagaagcagaaattgaatatcacgataaacgttcagcatcaatttacgttgcatttgacgttaaagatgacaaaggtgtcgttgatgcagatgctaaatttattatctggacaacaacgccatggacaattccatcaaatgttgcgattaccgttcatcctgaattaaaatatggtcaatacaatgtaaatggcgaaaaatatattattgcagaagccttgtctgacgctgtagcagaagcactggattgggataaagcatcaatcaaattagaaaaagaatacacaggtaaagaattagagtatgttgtagcacaacatccattcttagacagagaatcgttagtgattaatggtgatcatgttactacagatgctggtacaggttgtgtacatacagcaccaggtcacggggaagatgactatattgttggtcaaaaatatgaattgccagtaattagtccaatcgatgataaaggtgtatttactgaagaaggcggccaatttgaagggatgttctatgataaagctaataaagccgttactgatttattaacagaaaaaggtgcactattaaaattagactttattacacatagctatccacacgactggagaacaaaaaaacctgtaatcttccgtgctacaccacaatggtttgcctcaatcagtaaagtaagacaagatattttagatgcaatcgaaaatacaaacttcaaagtaaattggggtaaaacacgtatttacaatatggttcgtgaccgtggcgaatgggttatttctcgtcaacgtgtgtggggtgtaccgttaccagtattttatgctgaaaatggcgaaattatcatgacgaaagaaacagtgaatcatgttgctgatttatttgcagaacacggttcaaatatttggtttgaaagagaagcgaaagacttactaccagaaggatttacacatccaggcagccctaacggtacatttactaaagaaacagacattatggacgtttggtttgattctggttcatcacaccgtggcgtgttggaaacaagaccggaattaagtttcccagcggatatgtatttagaaggtagtgaccaatatcgtggttggttcaactcttctatcacaacttcagttgctacaagaggagtatcaccttataaattcttactttctcatggttttgttatggacggtgaaggtaagaaaatgagtaaatctttaggtaatgtgattgtacctgaccaagtggttaaacaaaaaggtgctgatattgcgagactttgggtaagtagtacggactatttagctgatgttagaatttctgatgaaattttaaaacaaacatctgatgtttatcgtaaaatcagaaatacattaagatttatgttaggtaacattaacgatttcaatcctgacacagatagcattcctgaatcagagttattagaagtggatcgttacttgctaaatcgtttacgtgaatttactgcaagtacgattaacaactatgaaaactttgactacttaaatatttatcaagaagttcaaaactttatcaatgttgagttaagtaatttctatttggattacggtaaagatattttatatattgaacaacgtgattctcatatccgtcgtagtatgcaaacagtgttatatcaaattttagttgatatgacgaagttgttagcaccaatcttagtgcatacagctgaagaagtttggtctcatacaccacatgttaaagaagaaagtgttcacttagcagacatgcctaaagttgtagaagtagatcaagctttattggataaatggcgtacatttatgaatttacgtgatgatgtgaaccgtgcattagaaactgctcgtaatgaaaaagttattggtaaatcattagaagctaaagttacgattgctagtaacgataaatttaatgcatctgaattcttaacttcatttgatgcattacatcaattatttatcgtgtcacaagttaaagttgtagataagttagacgatcaggcaacagcttatgaacatggtgatattgtcatcgaacatgcagatggtgaaaaatgtgaaagatgttggaactattcagaggatcttggtgctgttgatgaattgacgcatctatgtccacgatgccaacaagttgtaaaatcacttgtataattgaaattgtataaagtactcatacagatgatataaattaaagctctcttcataatcatgttgtagtttttgttgacatgatgaagagagtttttttgtgaataaaaaaatgaccaagttaccggtcatatatgtaaaaaatgtgcgatttactaaaataaaaattattcaggaatggtacaaattctctgaggcatataaatgcgttatagttgctattctcaattatgttcgcgataattttaagtaaaagtaagcacagatattgaatttgataggagttaattgaatgtatcataacagtaacgcaaactttgtcaatggtatcactttaaatgtgagagataagaatgaattaaagccattttatgaggacatattaggattaaatattataaatgagacattaacatcgatacaatatgaagtaggtcaaaataatcatgtcattacacttgttgaattacaaaatggacgtgaacctttaatgtccgaagcgggactgtttcatatcgcaattaaactacctcaaattagtgatttagctaatttactaattcatttaagcgaatatgatattccagttaacggaggtatacagcctgcttcgttatcattattttttgaagacccggaaggaaacggttttaaattttatgttgataaagacgaagcgcaatggacgaggcaaaataatttagtaaaaattgatattagaccattaaatgtaccgagattagtgagtcatgcaacaaaattgttatggttaggtattccagatgacgctattataggtgcattgcatattaagacaattcatttatcagaggtaaaagagtactacctcgattattttggattagagcaatcggcatatatggatgattattcaatatttttagcatcgaatggctattatcaacatttggccatgaatgattgggtatcagcaacgaaacgtgtagaaaattttgatacgtatggattagcaattgttgactttcattatcctgaaacaacacatttaaatttacaaggtccggatggtatctattatcgctttaatcatatcgaagttgaagattagtatatactttgaatggacgaaccatataatgaatcgtttttaatgatctttttatacaagttatgaaggaggctgggacattaagttcttaggcaatgtaaaaagctgatttctattaattatttgatagaaatcagcttttttgatatgtattttataatgtacagctcgttgagctgctattttccttatattaattgccattaatacaaaacctagctctcgtttaactttatttattcctcgaactgacattcgagtgaaactcaaaatagcctactttcttaaattaacaatatctattctcatagaatttgtccaattaagtgtagacgattcatgtcttatttttttaaagtatttaaaagtaaaattacatgttaatacgtagtattaatggcgagactcctgagggagcagtgccagtcgaagaccgaggctgagacggcaccctaggaagggacccatcatcaaaaattctatttatagaattttacagtaatgtgccagatgggcatagcgaagccattcaatacgaagtattgtataaatagagaacagcagtaagataatttttaattagaaaatatcttactactgtctttttagggatttatgttccagcctgctttcctaatttttaatgtcatcttaaatatgataaatgaataattaagttcatatttaatgtcaaaacatagtagtttatcaagtattgagttagtaacattagatttaatgtaatatgcttactttttttattagcaggtgtaagctataatataaagagttgtctcatggacgattgattggaggaacgaaaatgcacaaaaaatattttattggcacttccattttaatagcagtatttgtcgttatatttgaccaagttactaaatatattatagctactacaatgaaaattggagattcatttgaagtgataccgcactttttaaacataacatcacatcgaaataatggtgctgcatggggaatattgagtggaaaaatgacatttttctttattattaccattattatattaatagccttagtatatttctttattaaagatgctcaatataatttgtttatgcaagttgctattagtttactttttgcaggtgcacttggaaactttattgatagaattttaacaggagaagttgttgactttattgatacaaatatttttggttatgattttccaatatttaatatcgcagattcaagtttaacaattggtgtaatattaattattattgccttattaaaggatacttccaataaaaaggagaaggaggttaagtaatggagacttatgaatttaacattacagataaagaacaaacaggtatgcgtgtagataagttgctgcctgaattaaataatgattggtctcgtaaccagatacaagattggattaaagcaggtttagtcgttgcaaacgataaagttgttaaatctaattataaagtgaaacttaatgatcatatagttgtcactgaaaaagaagtggttgaagctgatattctacctgaaaatttaaatttagatatttattatgaagatgacgatgttgcagttgtatataaaccgaaaggcatggtagttcatccatcaccagggcattataccaatacattagttaatggtttaatgtatcaaattaaaaatttgtcaggtattaatggagaaattcgtccaggtattgttcaccgtatagatatggatacttctggtttattaatggttgctaaaaatgatattgctcatcgtgggcttgtagaacaattaatggataaatctgttaaaagaaaatatatcgctttagttcacgggaatattcctcatgattacggtacaatcgatgcgccaattggtagaaacaaaaatgatcgtcaatctatggctgttgttgatgatggtaaggaagcagtgacacattttaacgtactagaacattttaaagattatacgcttgttgaatgtcaacttgaaacaggacgtacgcatcaaatccgtgttcacatgaaatatattggcttcccattagttggtgatccaaagtatggaccgaaaaagacattggatattggtggtcaagctctacatgctggacttattggattcgaacatccagtaacaggtgaatatattgaaagacatgctgaattaccacaagactttgaagatttattagatacaattcgaaaaagagatgcataattgtgtcgtgctataattacgataacattattatgtaaactataagtgtttatcgttttcgttttttttaaatgaaaacacattataaaatagattaaggttaacatttttactgagtatggttaatttttcaatatagattgacaaagcgcctgattagtattatccttataacagtttaagtacaacataaagagtctttaattgagcgtccagagagacgtcaaagacatgaaaatatagatatatactaaaatgatcataacactttcacatatgcaagaataagtagtaatactacgattcttctatgtaaataggctgattgtatatactaaacctcatgtcgatattaaagacatgaggttttttgtttctaaattttgaaagggtgagaatatgtctgaacgtatcataatggatgatgccgcaatacaacgtacagtgacgagaatcgctcacgaaattttggagtataacaaaggtactgataatttaattcttttaggtatcaaaacaagaggtgaatatttagcgaatcgtatacaagataaaattcatcaaattgagcaacaacgtatacctactggaacaattgatattacatactttagagatgatatagagcacatgtcatcacttacgacaaaagacgcaatagacatcgacacagatattacagataaagtagtcatcattattgacgatgtgctgtatactggtcgaacggttcgtgcttcacttgatgctattttgctaaatgctagacctattaaaattggtttagctgctttggttgatcgaggacatcgtgagttaccaattcgagcagattttgttggtaaaaatatacctacttctaaagaggaaacggtaagtgtctatttagaagaaatggatcaaagaaatgcagttataattaaataataccccttttaattcagtacgagagactgaaaaaggtgggggagttgaatgataaataagttttcatatgcttgtttatctaataataccctcatgttcgacaactataagtcaatttctatggacgaaaatgacttgtagcaacttgtcacactttttgtctctttacatatactgatgtaaagagatttttttattatcggaggaaatgaatattatgcaaaatgatgaaatgtttgaacgaacagtaaaacccgtactagatgtaaatgaaaaaccacaaccagcgcaatgggcatttttaagcttacaacatttatttgcgatgtttggcgcaacagtactagtaccattcttaacaggactaccaatatcagcagcgttactagcttcgggaatcggtacattactttatatcttaataacgaaggcgcaaataccagcatacttgggatctagctttgcatttatcacgccaattatcacgggattaagtacgcatagcttaggagacatgcttgtagcattattcatgagtggtgttatgtacgtcatcatcgggattctaatcaaattaagtgggacagcatggttaatgaaattattaccaccagttgttgttggaccagtcatcatggtaattggtttaagcttagcgcctactgcagtcaatatggcaatgtatgaaaatcctggagatatgaaaggttacaatatcagtttcttaattgttgcaatgataaccttgcttgtaacaatagtcgttcaaggattttttaaaggattcctatctttaattccagttcttgtaggtattatcgtaggttatgtggtagcgatttttatggggattgtgaaatttgatgcaattatgtcagcaaaatggatagatttccctcatatttatctgccatttaaagattatgtaccttcatttcacttaggacttgtacttgtaatgattccgattgtgttcgtaacagtaagtgaacatattgggcaccaaatggtattgaataaaatcgtaggtagaaacttctttgaaaagccaggacttgataaatcaatcattggtgatggtgtttctacaatgtttgccagtattattggtggaccaccaagtacaacatacggtgaaaatatcggtgtattagcgattaccagaatatacagtatttacgtcattggtggtgcagcagttatagcaattgttttagcattcattggtaagttcactgcattaatttcttctatacctacaccagttatgggaggagtatctatattacttttcggtattattgcagcaagtggcttaagaatgttagttgaaagcaaagtagattttgcgaacaatcgaaatttagttatagcttctgtaattttagttgtaggtatcggtaatttagtatttaacttaaaagaaattggtatcaaccttcaaattgaggggatggcattagctgcactttcaggaattattttgaacttaatcttacctaaagagaaaaaacaaaacaattaagatttacaaattaaggagggcgcttttatgaatcatttattatcaatggaacatttatctacagatcaaatatacaaacttatccaaaaggcaagtcaatttaaatctggtgaacgtcaactaccaaactttgaagggaaatatgtcgcaaatttattctttgaaaattctactcgaacaaaatgtagttttgaaatggcagaacttaagctagggttaaaaacgattagctttgaaacatcaacatcatctgtttcaaaaggtgaatctttatatgacacatgtaaaactttagaaagtattggctgtgatttattagtcattagacatccgtttaataactactatgaaaaattagcgaatattaacatcccaattgcgaatgctggtgatggtagtggacaacatccaacacaaagtttacttgatttaatgacgatatatgaagaatatggatattttgaaggcttgaatgtattgatttgtggagacattaaaaattcacgtgtcgcacgtagtaattaccatagtttaaaagcattaggtgcaaacgtaatgtttaatagcccaaatgcttggattgatgattctttagaagcaccttatgtaaatatagatgatgttatagaaacagtagatatagttatgttattaagaattcaacatgaaaggcatgggcttgcagaagaaactagatttgcagcagatgattatcatcaaaagcatggcttaaatgaagtacgctataacaaattacaagaacatgctattgttatgcatccggcacctgtgaatagaggagtagaaatacaaagcgatttagtagaagcttcaaaatcaagaatttttaagcaaatggaaaatggcgtttacttaagaatggcagtcattgatgaattattaaaataggtaaggggacgaaaatgatgaaattaattaaaaacggtaaagtattacaaaatggcgaattacaacaagcagatattttaattgatggtaaggtaattaaacaaattgcacctgcaattgaaccaagcaatggtgttgacatcatagatgcgaaaggtcactttgtgtcacctggatttgtcgatgttcatgttcatttacgtgaacctggtggtgaatataaagagacaattgaaactggtactaaagctgctgctagaggcggatttacaactgtatgtccaatgcctaacacaagaccggtaccagattctgtagaacattttgaagctttacaaaaattaatcgatgacaatgctcaagtacgtgtattaccttatgcttcaattacaacacgtcaattaggtaaagaattggttgatttcccagcactagtaaaagaaggtgcctttgcgtttacagatgacggtgtaggagtacaaactgcaagcatgatgtatgaaggcatgattgaagctgcaaaagtaaacaaagccatcgtagcacactgtgaagataattcattaatctatggtggtgcaatgcatgaagggaaacgcagtaaagagttaggtataccaggtattccaaacatttgtgaatctgttcaaatcgcaagagatgtactattagctgaagcagcaggttgtcattatcatgtatgtcatgtttctactaaagaaagtgttagagtcattcgtgacgctaaacgcgcaggcattcatgttacagctgaagttacaccacaccatttattgttaacagaagatgatattcctggtaataatgccatttataaaatgaatccaccattgagaagtactgaagatagagaggctttgttagaagggttactagacggtacaattgactgtatcgcaacagaccatgcaccacatgcacgtgatgaaaaagcacaaccaatggaaaaagcaccattcggaattgttggtagtgaaacagcattcccattattatatacgcattttgtaaaaaatggtgattggacattacaacaattagtagattacttaacaattaaaccatgtgagacatttaatttagaatacggcacattaaaagaaaatggttatgcagatttaacaatcattgatttagatagtgaacaagaaattaaaggagaagatttcttatcaaaagcagataatacaccatttatcggctataaagtttatggaaatccgatcttaacaatggttgaaggcgaagttaaatttgagggggataaataatatgcaaagcaaacgttatctagtgttagaagacggttctttttacgaaggctaccgtttaggatctgataacttaactgtaggagaaattgtatttaatacagcgatgacaggttatcaagaaactatttcagatccatcatatacaggtcagatcattacttttacgtatccattaatcggtaattatggtatcaatagagacgattttgaatcattagtacctacattaaacggtattgtagtgaaagaagcgagtgcgcatccaagtaattttagacagcaaaagacacttcatgacgttttagaattgcatcaaattccagggattgcaggtgttgatacaagaagtattacgcgtaaaattcgacaacacggtgtgttaaaagctggttttactgatcgaaaagaagatattgatcaacttgtcaaacatttacaacaagtagaattacctaaaaacgaagtagaaatcgtttcgactaaaacaccgtatgtttcgacaggtaaggatctaagtgtcgtacttgtagactttggtaagaagcaaaatattgttcgagaattaaacgtcagaggttgtaacgtcacagttgtaccatatacaactactgccgaagaaattttagcaatggctccagatggcgttatgctatcaaacggaccaggtaatcctgaagttgtagaatgtgcgattccaatgattcaaggaattttagggaaaattccgttctttggtatctgtctaggacatcaactttttgcattatctcaaggagcaagctcatttaaaatgaagtttggtcatcgtggtgcgaaccatccagttaaaaatttagagactggaaaagttgatattacgagtcaaaaccatggatatgcaatagatatagattcgttaaaaagtactgatttagaagttactcatcttgcattaaatgatggtactgtagaaggtttaaaacataaaacattaccagcattttctgttcaataccatcctgaagcaaatccaggaccgtcagattcaaactatctatttgatgattttgtagcaatgatgactaattttaaggaaaaggagcgtcatatcaatgcctaaacgtaatgatatcaaaacaattttagtaatagggtctgggccaattatcataggtcaagcagctgaatttgattatgctggaacacaagcatgtctagctttaaaagaagagggatatcgagttattcttgtaaattcaaatccagcgacaatcatgactgataaggaaattgcggataaagtatatatcgaaccgttaactcatgattttatagcgcgaattatacgtaaagagcaacctgacgctttacttccaactttaggtggtcaaacaggtttaaacatggcgattcaactacacgaaagtggtgtgcttcaagataataacgtccaattattaggaactgagctaacatcaattcaacaagcagaagaccgtgaaatgtttagaacattaatgaatgatttaaacgttcctgtaccagagagtgacattgtaaatacagtagagcaagcctttaaattcaaagagcaagtgggatacccgctaattgttagaccggcatttacgatgggtggtaccggaggcggtatttgtcataatgatgaagaattacatgaaatcgtctcaaatggtcttcattatagtccagcaacgcaatgtttattagaaaaatctatcgcaggttttaaagaaatcgaatacgaagtaatgcgtgataaaaacgataatgccatcgttgtatgtaacatggaaaatattgatccagttggtattcatacaggcgattcaattgttgtggctcctagtcaaacattatcagatgttgagtatcaaatgttacgtgatgtttcattaaaagttattcgagctttaggtatcgaaggtggttgtaatgttcaattagcattagatccccattcattcgattattatattatagaagtaaatccgcgtgtatcacgttcatcagcgttagcttcaaaagcaacaggatatcctattgcaaaattagctgctaaaatcgcggttggtctaacattagatgaaatgttaaatccaattacaggaacatcttatgcagcgtttgaaccaactttagactatgtgatttcaaaaataccaagatttccttttgataaatttgaaaaaggagaacgagagcttggcacacaaatgaaagcaacaggtgaagttatggccattggtcgaacttacgaagaatcattgttaaaagcaattcgatcacttgagtatggtgtgcatcacttaggattaccaaatggtgaaagcttcgatcttgattatattaaagaacgtatttcacaccaagatgatgaacgattatttttcatcggcgaagcaattagaagaggcacaacattagaagaaattcataatatgactcagattgattacttcttcttacacaagttccaaaacattattgatattgagcatcaattaaaagagcatcaaggtgatttagaatatcttaaatatgcaaaagattatggatttagtgataaaacaatagcgcatcgctttaatatgacggaagaagaagtatatcaattgcgtatggaaaatgatattaaacctgtttacaagatggttgatacttgcgcagctgaatttgaatcttcaacaccatattattatggtacatacgaaactgaaaatgaatccatagttactgacaaagaaaaaatcttagtattaggctctggaccaattcgaatcggccaaggtgtagaatttgactatgcgacagttcacgccgtttgggcaattcaaaaagcagggtacgaagcgataattgtgaataacaatccagaaacagtttcaacagacttctcaatttctgacaaattatactttgaacctttaactgaagaagatgtgatgaatatcattaatttagaaaaacctaaaggtgtcgttgtacaatttggaggacaaacagcgattaatttagcagacaaattggctaaacatggtgttaaaatacttggtacttcactagaaaatctaaatcgtgctgaagatagaaaagaatttgaagcactattaagaaaaattaacgtgccacagccacaagggaaaacagctacatcacctgaggaagcattagcgaatgctgcagaaatcggatatccggttgtagtaagaccttcttatgtattaggtggtcgcgcaatggaaattgtagacaatgacaaagagttagaaaactatatgacccaggctgtaaaagcgagtccggaacatccggtactagtcgatagatatttaactggtaaagaaattgaagttgatgcgatttgtgatggagaaacggtcattattccaggaatcatggaacatattgaacgtgctggtgtgcatagtggtgactcaatcgctgtatatccaccacaaactttgacagaagacgagttagcaacacttgaggactatactataaaattagctaaaggtttaaacatcattggcttaatcaacattcaattcgttatagctcacgatggtgtgtatgttttagaagtaaatccacgttctagtagaacggtaccattcttaagtaaaattactgatattccaatggcacaattagctatgcgagcaatcattggggaaaaactaacagatatgggttatcaagaaggggttcaaccatatgctgagggtgtctttgtgaaagcaccagtatttagttttaataaattgaaaaatgttgatattactttaggacctgaaatgaagtcaacaggtgaagtgatggggaaagatactacattagaaaaggcgttattcaaagggttaacaggtagtggcgttgaagttaaagatcacggtacagtattaatgaccgtcagtgacaaagataaagaggaagttgttaaattggcacaacgcttaaatgaagttggctataaaattttagcaacgtctggaacagctaataaattagctgagtatgacatacctgcagaagtagtaggcaaaattggtggcgaaaatgatttattaacacgtattcaaaatggtgatgttcaaatcgttataaatacaatgactaaaggtaaagaagtagaaagggatggcttccaaattagacgtactacagttgaaaatggtattccatgtttgacatctttagatacagctaatgccttaacgaatgtaattgaaagtatgacatttacaatgcgtcaaatgtaaatcaatcaaactgtatcggtggggctgtaattaaccatttacttaaagaagtttatattacagcctcattattttaatgaatttcttaatataaagggagacatatatgatgaaagatttaccaattattgcattagattttgaatcaaaagaaaaagtaaatcaatttttagatttatttgatgaatcattattcgtaaaagtaggtatggaacttttttatcaagaaggtcctcaattaattaatgagataaaagaaagaggccatgatgtatttttagatttaaaactgcatgatattcctaatacagttggtaaggcgatggaaggactagctaaattgaatgttgatctggtaaatgttcatgctgctggtggcgtaaaaatgatgtctgaggccattaaaggattaagaaaacataatcaagatacaaaaattattgcagtaacacagcttacgtcaacaacagaagacatgttacgacacgaacaaaatatacaaacatcgattgaagaggccgttttaaattatgccaagttagcaaatgcagctggtttagatggcgttgtttgttcacctcttgaaagtcgtatgttgactgaaaagttaggtacatcatttttaaaagtaacaccaggtattagacctaaaggtgcatctcaaaatgaccaacaccgtattacgacaccggaagaagcaagacagcttggttcgacgcatattgtagtcggtagaccgattacacaaagtgacaatccagtcgaaagttatcataaaattaaagaaagttggttagtataatggctaaagaaattgcaaaatcattattagatattgaagctgtaacattatcaccaaatgatttatatacatggagttcaggtattaaatcaccgatttactgtgataaccgtgttacgttaggttatcctttagttcgaggcgcaatccgcgatggtttaattaacttaattaaagaacactttcctgaagtagaagttatttctggtactgcaacagctggtattccacatgcagcttttattgctgaaaaattaaaattaccaatgaattatgttcgttcatcaaataagagtcatggtaagcaaaatcaaatcgaaggtgctaaaagtgaaggtaaaaaagtagttgtgatagaagatttaatttcgacagggggatcttcagtcacagcagttgaagccttaaaactagcaggtgcagaagtattaggtgttgtagctatctttacttacggtttgaaaaaagcagatgatacatttagcaatattcaactacctttttacactttaagtgattacaatgaattaattgaagtagctgaaaatgaaggtaaaatttctagtgaagatatccaaacattagttgaatggagagacaacttagcataatatagacactagaaggaggaattcaacaaatgaatgacaaaacatctaatgatttatatgggaagataaaacattgtaacgaatttatcaatcattcaaatgattccaatctatctagtagtcacgatgtcgacgaaagttcaacgaagcaaaaacatataaaaaataaaacaactatagatcataatgatgatttatttaaacatgtaaaggatatattacgtaaacaaggacaaatttaaaaacaaaaaagctatagtgtttaatatcaggggctgcttaaccacatccgaatattacaaacactatagcttttattatataaaaaatttattagcggataattaactttattaaaatccaaccaattaagaatacgagtaataggactaatactggaatcacataatgtaacataacgtccctcctttaacttaattttaattgtaatcaaatttgacaataagtcaaaacattaatacctatgataagtatcatttattaacatatgtatcatatttttaatcttgcgtaatttttatcgttaactatgtgatttaatcaacaggccaataagacgtttgtcattcgtgcacataacggtacgacgcgcttttgtcattttaattatgttaagataatagtagttatagaagttcaatctataggaggcatagcatggatattccaaaaatcacgacatttttaatgtttaataaccaagctgaagaagctgttaaactatacacaagcttatttgaagatagtgagattataacaatggctaagtatggtgaaaatggacctggtgatcccgggactgtacaacactcaatatttacattaaatggacaagtattcatggcgattgatgctaatagtggcacagaattaccaatgaatcctgcgatttcattatttgttacagtaaaagatactattgaaatggaacgactatttaatggattaaaagatgaaggtgccattttaatgccaaaaacgaatatgccaccatacagagagtttgcttgggttcaagataagtttggagtaagttttcaattagcattacctgagtaaaaggattcgcacagcgttgaatgataaagaaacactttttcttatgcatgcgttttacctatgtatttctattttaagtacacattagcattttagtttcgctcatttttaaaatcacaaagataatttgtaacttaaatgatgatacgttatttaaaaacacgatacttcgtttcaatgaacgcattaaataataaataaacacctcaccataagaaaggactactttcttttgtgaggtgtttatttgtcgacaacttgattatgattgtttcattttttgaataagttcataatcaggtgtagcatacaaagttttttgattgtcatatgttacaaacccaggctttgcacctgatggtttatgcacatttttaattaatgtataatcaacaggtatttgtccagaattaccagcttttgaaaagtatcctgctaacatagccgcttccttgattgtcgtatcacttggtgcatcattaaatataacgacatgtgaaccaggaatatcttttgtgtgtaaccatgtgtgagtttttttagcttttttatttgttaaataatcattttgcttgttattcttaccaacatatatatcgtcgccatcagttgatacataatgttgtaattgaatctgcgctttctttttcttagtttgatttttacgctgtttcataaagccttgttctgctaattcatctctaatttcatcaatgtcatggacagaaatatgatgtaattgttgttcgattgttgaaaaataatctatattgtctttcgtcaattgaatttgatgttgtaattcacgttctctcgttttcatacgattatattgtttataataatattgagcatttgctgatggggattttgtaggatttaaaggaatgacaacttcttcattcgtataataattcaatgccgtcacttctttatcgccttgcttaattcgatatatattagcagtgatcaattcaccatataactgttcagtatctttatttttagactgctcatattcttcaatcaacttcgctaatttattttgatatttgtgcaactgctgttgaacaaatcgaactaaatcattcgcacgttgtttaacgcgttcacgttcgccacgcgcatcataaaaacgatcaagcaaatcatttaatgaatcgtatgtaactgtatcatcattaaattgatttaactttataaaatagaaatcctctttacctgtttcatgatttttatgaaaaataggagtaggtggtaacttggtttctgccattacttcgtcaaatgcttctggtaatgttgatgaagtcataaattgacgacgactaacgatttcattcgtaattaaagggctaaatccttcaaactgattcaataattgtttagcaatattacctgcgttaaaatcgatatatttcaacacctctgcacctgtaatatcatacggatttattttgtgctgagtaggtggtgcttcataattaaatcctggcattactgtacgatagtgattcgtatttggtgttaagtgtttaaatccttcaattattttgcgattttcatctactaaaattaagttactatgtttacccataatctcaaggatgacagtgcggtaaatagtatcgccaatttcatctttactctttatatcgatttcaatgcgacgatcattaccaatttgcttaatcgattcgataataccaccttctaagtgttttctaaaaacacgcgcaaacatgggtggattaaatggattatcatattttttagtagtcaattgtaatcttgaaaagtttggatggattgacaataacaattgatggttttgtctattttgacgtacaaccattagtatcgtgtcattatcaggttgattgattttgtgaacacgtcctgttgttaaaaattgtagagactcaaccattttctttgtaaataagccatcataagccataatttatcttccaccttcttcatatcattcgtttcattttaacatgattgtaacttttcagtatagttattgaaccatacattatgccatacattttacattatctaaaagtttgcaattcaatttatttaattaaaattaatcgtgcaatataacgatattgttagacttaatagaaattatggcatgcaatttcaaatatgctatacaatataaagaacaatgtgatatcatatttaaataatagaagattagcttagagaggtcgtaaggcatggataatgaaaaaggattgttaatcgttttatcaggaccatctggagtaggtaaaggtactgttagaaaacgaatatttgaagatccaagtacatcatataagtattctatttcaatgacaacacgtcaaatgcgtgaaggtgaagttgatggcgtagattacttttttaaaactagggatgcgtttgaagctttaatcaaagatgaccaatttatagaatatgctgaatatgtaggcaactattatggtacaccagttcaatatgttaaagatacaatggacgaaggtcatgatgtatttttagaaattgaagtagaaggtgcaaagcaagttagaaagaaatttccagatgcgctatttattttcttagcacctccaagtttagaacacttgagagagcgattagtaggtagaggaacagaatctgatgagaaaatacaaagtcgtattaacgaagcgcgtaaagaagttgaaatgatgaatttatacgattacgttgtagttaatgatgaagtagaacttgcgaagaatagaattcaatgtattgtagaagctgagcacttaaaaagagagcgcgtagaagctaagtatagaaaaatgattttggaggctaaaaaataatgttaaatccacctttaaaccaattaacgtcacaaattaaatcaaagtatttaattgcaacaactgcagcgaaaagagcgcgtgaaattgatgaacaacctgaaactgaattattaagtgaatatcattcatttaaaccagttggtagagcgttagaagaaattgctgacggtaaaattcgccctgttatttcaagtgattattatggtaaagaatagtttcgaccattaaaaatatgtgaagctagacgtacatcaaatacgtcaaggcatatccaaatcaaacgcacctatgtaggtgtgtttttttagtttatccaatgattgatgttataataatactaaatttgtatctataaaaaagtaatgagcatttgtgcgcatatgatgatgtaaagcgtaaatgtcatagtgatatttaagggagattgaatatgaagaaaatattattagccgttacaggtggcattgcggcatataaagcaattgatttgacaagtaagttaacacaatctgggtatgaagttcgcgttatgttaacgaatcacgcacaaaaatttgtgacaccattagcatttcaagcaataagtcgaaatgctgtttatacagatacttttatagaagaaaatccttcagaaatacagcatattgcattaggtgattgggcagatgcaatcattgttgcacctgcaacggcaaatacaattgcaaaattgagtgtaggtattgctgatgatttggtgacatcaacgttgctagcaacagagacaccgaaatttattgcgcctgctatgaatgtgcatatgtatgaaaataaacgtacgcagcaaaatattaatattttaaaagaagatgggtatcattttatcgaaccaggaagcggatttctagcatgtggttatgttgctaaaggacgtatggaagaaccgcttcaaatcgtttctgtaattgatgctcattttcaaaatagtaatcgtttagctaatagttcatttcaagataaacgcgcattggttacagcaggaccaactattgaagttatcgatccagtcagatttgtatccaatcgttcttctggaaaaatgggctatgcaatagctgaagcattgcgaaatcgaggagctatcgtgacgttagttgctggtcctacaacactagaggatccaaaagatattgaagttattcatgttcaaagtgctgaagaaatgtttgaacaagtgacaagccgatttgacgaacaagatattgttgtaaaagcagcagccgtatctgactatacaccggttgatgtattagaacataagatgaaaaagcaggatggtgatttgtcagtatcttttaaacgtactaaagacattcttaaatatttaggtgaacataaaacatcacagtatttaataggctttgcagcagagactgaagatattgaaaattatgcacaacaaaaattacgcaagaaaaatgcagatgtgattatttcaaataatgttggggatatgtctatcggatttagttctgatgataatgaattgacaatgcattttaaaaataatgaaaaagtaaatatcaagaaaggaaaaaaagtagtattagctgcacaaattttagatgaactagaaactaggtggcaataatgatagcgaaagtcatagtcgatgtcgcgtcgaagagcgttgactataaatttgattatataattcccgaacaactcgaatctgtcatccaacctggtgtgcgtgtaattgtaccttttggaccaagaacgattcaaggttatgtaatggaagtaacagcagaacctgatgcacaacttgacgtttcgaagttaaaaaaaatcatagaagtgaaagatatacaaccagaattaacatcagaattaatagctttaagtgagtggatgggttcaactcatgtcattaaacgtatttctatgctagaagtgatgcttccgagtgctattaaagcgaagtataaaaaagcatttaagatgaaagatgacatagagctaccttcagctttattacaaaaatttgataagcatggttactattattataaagatgcgcaaaaaaataatgatattcaattgcttatgaagttgttaaaagatgatatcgttgaagaaaaaacgattctcacacaaaatataactaaaaaaaccaagcgtgctgttcgtgtcattgaagggtatcatcctgatgaagtattagctaagttggagaaagttattaaacaatacgatttgtatgcttacttgtctgaagaacaacataaaacaatatttttaactgatattgaggatatgggcttttcaaaatccagtttagatggacttatcaaaaaaggttatgttgaaaaatatgacgcggttgttgaaagagacccatttaaagatcgtgttttcgaacaagaatcaaaacagcaattaacagaagaccaatataaagcatatgaagcgattaaagctaaaattgtaagccaagagcaagaaacatttttacttcatggtgtgacgggatcaggtaaaacagaagtatatttacaaacgatagaagatgttttaagccaaggaaaacaggcgatgatgttagttcctgaaatcgctctaacaccgcaaatggttttacgcttcaaacgtcgatttggtgatgacgttgctgtattacattctggcttatctaatggggaacgttatgatgaatggcaaaaaattagggatggtcgtgcgagagtaagtgttggtgcaaggtcaagtgtgttcgcacctttcaaaaatttagggttaatcatcattgatgaagaacatgaatctacatataaacaagaagattatccgagatatcacgctagagaaattgcccaatggcgaagtgaatatcatcactgtccagtcattttaggaagtgcaacaccatgtcttgaaagttatgcacgagctgaaaaaggcgtttatcatttgctatcattaccaaacagagtgaaccaacaagctttacctgaaattgatatagtagacatgcgtgaagaattgagtgaaggtaatcggtcaatgttttcaaaagatttacgtgaagccatacaattaagattagatcgacaggaacaagttgttttatttttaaatcgacgtggttatgcatcgtttatgttatgtcgggattgtggatatgtaccgcaatgtccaaactgtgatatttcattaacgtatcataaaacgacagacttattaaaatgtcactattgtggttaccaagagacgccaccgaatcaatgtccaaattgtgagagtgaacacattcgacaagtaggtactggtactcagaaagttgaagaactattgcaacaagaatttgaagatgcgcgcataattaggatggatgtagatacaacctcaaagaaaggtgcacatgaaaagttattgactgaattcgaaaaaggtaacggtgacattttactaggtactcagatgattgcgaaaggattagattatccaaatattactttagttggtgtgctgaatgcagatacaatgttaaatttacctgattttcgggcgagcgaacgtacttatcaactattaacgcaagtggctggtagagctggtcgtcatgaaaaggcaggtcaagtcatcattcaaacgtataatccagatcattattcaatattggatgttcaaaaaaatgattatttaacattttatcgtcaggaaatggaatatcgtaaattaggaaagtatccaccgtattattatttgattaatttcacaatctcacataaagaaatgaagaaggttatggtagcatcgcagcatgttcataaaattttattacagcatttaacagaaaaagcgcttgtactaggtccatctccggcagcacttgcgagaatcaacaatgaatttagattccaaattttagtgaaatataaaagtgaacctggattattacaagccattcagtttttagatgactattaccatgaaaaatttataaaagaaaaattagcattgaagattgatattgatccacagatgatgatgtaacattactaattattagaaacaagttcagtatgtacgagtatttgaaccagtgtttgaatatttactttaagtacagaaaaagggcagaatatacaactgttaactatttaaattagcagtttatattctgtctttttatatggctttataacttacgtgattttggtttgataaggaatttattagtattttcatttacgaattctgattttaatgcaagcgccatacttactgatgaataaaagtactaatgattaaacaaactatttttaaatggcaaattgaaatagtgcgaattttaaacttataaattaatggctataaactattttatatctatctatgttttaactacttaaattattagacaaaacaattttcttaaattatcaattaaagtatttaaaaatattgatggttaatgtaaaatatcaatataaataagttttttaaatttatgtatgtttatttgattcaaacaaaataacttaagaggagaaagtttatgaaaaagacactgggatgtttacttttaattatgcttttagtcgtagcaggttgttcttttggtgggaatcataaattatcatcaaagaaatcagaagaatcaaaacaagaaactgtaaaaaaagaatcggaagaagagaaagatccagatttagagaaatatgaagaaatagagaagaaaatgaaaggaattaaagatgcgccatctcttgataagttggatccattaatgacagaaaagtcgtttacgaatagtaaagggattcaaggatggaaagattacaaagaattaatgggtaaagtggaacttgcagattatagatttactaaagattcaaaaggatcttcaataaaagatgttgatgcattctttaaaggtaagaaaggtataaaaaggaaagtgattgaaacacacgatgatgtaaaacaagttgattattggtatgtagatccagatggaaagaaaattggcaattcaaacacacctgttttttacgcagaaattatgacaaaatataaagatggaaagttagtttatgcatcagtcgaaccaggatcttacgtaatacataaagatgatgcaattaaatatgacgattattctaagttaaaaaaattaagtcagctaactaaacttgatcatccaaaaccagttccatatagcgtagctcaaatcaaatctttcggagtacctttaacaagcgtttcatttatgacacatggatcaaaggatactaaagatgaagtgttgccggcattggcctatttcactttttcaccaaaaaattatgaagacaagtctaatccagatccaaaagttttaaatttagtacatatggatttcttaaatgcatctagtgattttggtaacgcacattttgttgttttaagtaaatatattaaagagtatgaatcaaactatgaaacagcgtcagatgattctttaaaatagtatttactgtgtgaaaaataaatagtgtactacattaaataatcgcaataataatcccgataaacaatcagcattactgcttatcacatagagttcgtaataactataactctatgattcgcaaataataaatgattgtcatcgggatttatttttatcaatttataaagtgacattaccttgttcatcagcaggtttgaaaacagtaatcactgcactaataattgctaaaatgtgtgggatacctgtccaacagaatattaagtgtagaataccttgcatattcttgccggcataaaatttatgaataccaaaactacctaagaacaatgctaataaaatataaataactttgtttacttgcatttctttccctccagttgaattgcttataatgacattagcttctctttttattatacccacttttagttcaaacattctagtttaagcattcccaatcatctaaatttcagttattcaatccttacaataaatttaggattacatttcagttgcattgtattattttacgtgtgaaatatacgtaatgaatcacatgacaatcttcaaattgaaaaatatacattctatgatgtaaggtcgcatttttaatatatttacgttataatagtttgatgaattttattgaggagtaagagttatggcgattaaaaagttagtaccagcatcgcatcctattttaacgaaaaaagcgcaagcagttaaaacatttgatgattcgttaaaaagattattacaagatttagaagatacaatgtatgcacaagaagctgctggcttatgtgcacctcaaattaatcagtcattgcaagtggcaattattgatatggaaatggaaggattattacaacttgttaatccgaaaattattagtcaatcaaatgaaacaataacagacttagaaggttcaattacattgccagatgtttacggcgaagtgacaagaagtaaaatgatagttgtcgaaagttatgacgtcaatgggaacaaagttgaactaactgcacatgaagatgtagcaagaatgattttgcatattatagatcaaatgaacggtatcccttttacagaacgtgcggaccgtattttaacagataaagaagtggaggcatattttataaatgactaaaataatatttatgggtacaccagacttttcaacaactgttttagaaatgcttattgcagaacatgatgtcattgcagtcgtaacgcaaccagatcgacctgttggacgtaaacgtgttatgacaccaccaccagttaaaaaagttgcaatgaaatatgatttacctgtatatcaacctgaaaaattaagtggatcagaagaattagaacaattgcttcaattagatgtagatttaattgtaactgctgcttttggacaattattacctgaatcattgttggcattaccaaatcttggggcaattaatgtacatgcatcattgttaccgaagtatagaggtggtgcaccaattcatcaggcaattatcgatggtgaacaagaaaccggcataacaattatgtatatggttaaaaaattagatgcgggtaatattatttcgcaacaagcaattaaaatagaagaaaatgataatgtcggtacgatgcatgataaattaagtgtattaggggcagatttattaaaagaaactttaccatctattatagagggcacaaatgaaagcgtacctcaagatgatacgcaagcaacatttgcttccaatattcgacgcgaagatgagcgaattagctggaataaaccaggaagacaagtgtttaatcaaattcgtggattatcaccatggccagttgcttatacaactatggatgacactaacttgaaaatatacgatgctgaactcgttgagactaataagataaacgagcctggaaccattatagaaacgactaaaaaagccattattgttgctacaaatgataatgaagctgttgcaattaaagatatgcaattagctgggaaaaagagaatgttagctgccaattatttaagtggtgcgcaaaacacactagtagggaagaaacttatatgatagaaaacgtgagaagtcttgcttttgacacgattcaagatatattaaatgaaggtgcgtatagtaacttgcgtatcaatgaagtgttgtcagaaaatgaattaaatgcaatggataaggctttatttacagaaattgtctacggaaccgttaaaagaaaatatacgttagatttttatttaaagccttttgtgaaaacaaagattaaggcatgggttaggcaattattatggatgagtatttatcaatatgtttatttagataaagttccaaatcatgccattattaatgaagcagttgaaatagcaaaagaacgcggtggctatcataatggtaatgtcgtaaatggtattttacgtacaatgatgcgtagtgacttacctgattttaatgaaattgcagatcctaaaaaaagaatggcaatcgagtatagtatgccgaagtggattatagatcattgggcaacacattatggtctcgaagaaactgaaaaaattttacagtcatttttagaaacgacatcaacaactgtgcgtgccaacctgacgcgagcatcattagatgatattattgaaaagttgcaagacgaaggttatgacgttgaaaaagatcatgacttaccttattgtctccatataggaggacaaccaattattcattctcgttcatttaaagatggattcgtttcaattcaagataaaagctcaatgtttgttgcacacattatgaatgtagaccgacatgatcacgtattagatgcatgtagtgcacctggcggtaaagcttgtcacattgctgaagttttaatgccagaagggcaagttgacgcttcagatatacatgatcacaaaatagacttaattaattttaatataaaaaaattacgattaacaaatattaaagcttttcaacatgatgcgacaaaaccttatgataaaacatacgataagatacttgttgatgcaccatgtagcggattaggtgtaatgagacataagccggagattaagtatactcaaagcaaacaacatattgagtcactagttgaattacagcttgaaatattggaaaatgtaaaaaacaatgtaaaaataggtggagaaatcatctattcaacatgtacaattgagcaactagaaaatgaaaacgtgatttatacgtttttgaaaaataataaaaacttcgaatttgaaccgtttcaacatccgataactggagagttggtcaaaacgttacaaatcatgccgcaagactttaattcagatggattctttatcactaagataaaaagaaaggacaattaggaatgataactgctgaaaagaaaaagaagaataaatttcttccaaattttgacaagcaatcaatatattcattgcgatttgacgaaatgcaaaactggctcgttgaacaagggcaacaaaaatttcgagcgaaacagatttttgaatggttatatcaaaaaagagtagattcgattgatgaaatgacgaacttatcgaaagacttacgacagcttttaaaagataactttactgttacaactttaacaactgtagtaaaacaagaaagtaaagacggtacaattaaattcttatttgaattacaagatggctatacaattgaaactgttttaatgagacatgattatggaaattcagtatgtgtaacgacacaagtaggttgtcgcatcggatgtacgttttgtgcttctacacttggcggcttaaaaagaaaccttgaagctggcgaaattgtttcacaagttttaacagttcaaaaagcccttgatgctacagaagagcgcgtatctcaaattgtcataatgggtatcggtgaaccatttgaaaattatgatgaaatgatggactttttaagaatcgtcaatgatgataacagtttaaatattggtgcacgtcacattacagtatcaacatcaggtatcattcctagaatatatgactttgcggatgaagatattcaaattaattttgctgtaagcttacacgccgcaaaagatgaagtgcgatcacgcttgatgccaattaaccgtgcatataatgttgagaagttaatcgaagcaattcaatattatcaagaaaaaacaaatcgtcgtgttacttttgaatatggtctgtttggtggtgtgaatgaccaactagaacatgcaagagaattagcacatttaataaaaggcttaaactgccatgttaacttaattcctgtcaaccatgttccagaaagaaattatgtgaaaacggctaaaaatgatatctttaaatttgaaaaagaattaaagagactaggaattaatgccacaatacgtcgtgaacaaggttcggatattgacgcagcttgtggtcaattaagagcaaaggaacgacaagtagaaacgaggtaaagacaaatgctagaggcacaattttttactgatactggacaacatagagataagaatgaagatgcgggtggtattttttataatcaaactaatcaacaacttttagttctgtgtgatggtatgggtggccataaagcaggagaagttgcaagtaaatttgttacagatgagttgaaatcccgttttgaagcggaaaatcttatagaacaacatcaagctgaaaattggttgcgtaataatataaaagatataaattttcagttatatcactatgcacaagaaaatgcagaatataaaggtatgggtacaacatgtgtttgtgcacttgtttttgaaaaatcagttgtgatagcaaatgtcggtgattctagagcctatgttattaatagtcgacaaattgaacaaattactagtgatcactcatttgttaatcatcttgttttaacgggtcaaattacgccggaagaagcatttacacatccacaacgtaatattattacgaaggtgatgggcacagataaacgtgtgagtccagatttgtttattaagcgattaaatttttatgattatttattattaaattcagatggattaactgattatgttaaagacaatgaaattaagcgtttgttagtaaaagaaggtacaatagaagatcatggtgatcaattaatgcaattggcattagataaccattcgaaagataacgttactttcatactcgcggctattgaaggtgataaagtatgataggtaaaataataaatgaacgatataaaattgtagataagcttggcggcggtggcatgagtaccgtttatcttgctgaagatacgatacttaacattaaagttgcaattaaggcgatttttataccacctagagaaaaagaagaaacattaaaacgttttgaacgagaagtacataactcatcacagctatcacatcaaaatatagtaagtatgatcgatgttgatgaagaagatgactgttactacttagtaatggaatatatcgaaggtccgactttgtctgagtatattgaaagtcatgggccattaagtgttgacacagcgattaattttacgaatcaaatattggatggcattaaacatgcgcatgatatgcgtattgtacatagagatattaagccacaaaatatattaattgacagcaataaaacgttgaaaatatttgattttggaattgctaaagctttaagtgagacgtctttaactcagactaatcatgtgttaggtactgtgcagtacttttcgccagaacaagcaaaaggtgaggcaacggatgaatgtacagatatttattctataggtattgtgttatatgaaatgcttgttggtgaaccaccctttaatggagaaactgcagttagcattgcgattaaacatattcaggattctgtgccaaatgtgacaacagatgtacgtaaggatattccgcaatctttaagtaatgtcattttacgcgctacagaaaaagacaaagcgaatcgttacaaaacaattcaagaaatgaaagatgatttgagtagtgttttacatgaaaatcgagcgaatgaagatgtctatgaactcgataaaatgaaaacgatagcggtacctttgaaaaaagaagatctagcaaagcatattagtgaacataagtcgaatcaacctaaacgtgaaacgacgcaagtacctattgtaaatgggcctgctcatcatcagcaattccaaaagccagaaggtacggtgtacgaaccaaaacctaaaaagaaatcaacacgaaagattgtgctcttatcactaatcttttcgttgttaatgattgcacttgtttcttttgtggcaatggcaatgtttggtaataaatacgaagagacacctgatgtaatcgggaaatctgtaaaagaagcagagcaaatattcaataaaaacaacctgaaattgggtaaaatttctagaagttatagtgataaatatcctgaaaatgaaattattaagacaactcctaatactggtgaacgtgttgaacgtggtgacagtgttgatgttgttatatcaaagggccctgaaaaggttaaaatgccaaatgtcattggtttacctaaggaggaagccttgcagaaattaaaatcgttaggtcttaaagatgttacgattgaaaaagtatataataatcaagcgccaaaaggatacattgcaaatcaaagtgtaaccgcaaatactgaaatcgctattcatgattctaatattaaactatatgaatctttaggcattaagcaagtttatgtagaagactttgaacataaatcctttagcaaagctaaaaaagccttagaagaaaaagggtttaaagttgaaagtaaggaagagtatagtgacgatattgatgagggtgatgtgatttctcaatctcctaaaggaaaatcagtagatgaggggtcaacgatttcatttgttgtttctaaaggtaaaaaaagtgactcatcagatgtcaaaacgacaactgaatcggtagatgtaccatacactggtaaaaatgataagtcacaaaaagttaaagtttatattaaagataaagataatgacggttcaactgaaaaaggtagtttcgatattactagtgatcaacgtatagacattcctttaagaattgaaaaaggaaaaacagcaagttatattgttaaagttgacggtaaaactgtagctgaaaaagaagtcagctatgatgatgtataaatataattgaagtaaatgtaccgaggtttctatttggaagtctcggtatttttatgttgagattgcggtagttttaaaatgcttcatgtcatcatatacaggtgagcattgtctatcaattctgtatcactctcacaatatttatatcatttgaaatgatcatttatatattaattttccagtctttgatataataaatgcagtaaaattaatcgagaggtgccattttgaagacaggtcgaatagtgaaatcaattagtggggtatatcaagtagacgttaatggcgaacgtttcaatacaaaaccacgaggattatttagaaagaaaaaattttcaccggtagttggtgatatagtggaatttgaagttcaaaacattaacgaaggttatattcatcaagtgtttgagcgggaaaatgagttgaaaagaccacctgtaagtaatatagatacactagtaattgtaatgagtgctgtcgagccaaatttttcaacgcaattattagatcgatttttagttattgcacattcgtatcagttaaatgcgagaattttggtgactaaaaaagataaaacaccaattgaaaagcagttcgaaataaatgagttgttgaaaatatatgaaaatattggctatgagactgaatttattggaaatgatgatgatcgaaaaaaaattgtagaagcttggccagctggacttatagtacttagtggtcaatcaggtgtcggtaagtccactttcttaaatcattatcgtccagaacttaatcttgagacaaatgatatatcaaaatcattaaatcgaggaaagcatactacaagacatgtcgaactattcgaacgtcaaaacggttatattgcagacacacctggattcagtgctttagattttgatcatatagataaagatgaaataaaagattattttcttgaattaaatcgatatggtgaaacatgtaagtttaggaattgtaatcatatcaaagaacctaattgtaatgttaagcatcaattagagatagggaatattgcgcaatttagatacgaccattatttacaactatttaatgaaatttcaaatagaaaggttagatattaaatgacaaaactatatccatcattattatctgttgattttttggatttacaacatgaattaaaacgacttgaagaagcaggcgtcgacggagttcattttgatgttatggatggtcaatttgtgcctaatatatctattggtttaccaatattagatgcagtaagaaaaggcacaacattacctatagacgtacatttgatgattgaaaatccagaaaagtatattgcatcatttgcagaacatggtgccgatatgatttcaattcatgtcgaatcaacgcctcatattcatcgtgctattcaaatgattaaacatttagataaaaaagctggtgtagtaattaatcctggtacaccaatatcacaaattgaacctattttagacattgttgattatgtactagtgatgacagttaacccagggtttggtggtcaatcatttattgatcaatgcgtagaaaaaatagcgggtcttaatgctattaaaatggaacgtcaattaaactttgatattgaagttgatggaggcgtaaataccgatacagcgaaagtttgtgttgaaaatggtgctacaatgctagtaacaggttcatttttctttaaacaagaggattataaaaaagtcacacaagcattgaaaggttgagtgtatatgcatataaatttattatgttctgatcgacacttgccgcaagatatttgggccaaaagtaatgaaggtaaatggggcggcgttgatagaggtgctttgattttattgaagcatcaaattatcccttttttctcagtgggagactttgattcagtcagtaaagaagaacgccaacttctaacagaacagttacaaatcaaaccagttcaagctgaaaaagctgatacggatttagctttagcggttgataaagctgttgcacttggatttgatagtattacaatttatggtgcaacaggcggacgattagatcacttttttggggcaattcagttattattgaaaaaagcatattataaacatgatgttcatatagaagttatcgatcaacaaaataaaattgaattattgcctaaaggtcaacatacagttgaaaaagataagagttatccgtacatttcatttataccgatgactgatgatgtagaactttctctagcaggttttaaatataatttagctagacaaatgcttaatataggttctactttaactatttcaaatgaaattgagtctttgcaagcgaaagtaactgtacatgatgggttgattttgcaaattagaagtacagatttaaattaagtatattcaaatttgtgaggatttttaataaagtgcatgagttatttaataaagtgacgtttatagatagaatttataacataataatagatgaatcacgctgtaattaatgaagattatggcgtgatttattattgaaaggaaaattgtaggtcctagtacattgatttatgtgccaaaatcgatattgaacccataagtccaatttgacagagaaccattattaaacgtattaaccaaattatattgatagttcgaatttcactatgaaccattatgtattgtttggtaacaaaaaaagaactaagaggttgagctcttagttcttaagtaaatgtgtcctccacataaggtcacattttttatgtgcaatatatttattaaactctagttactttaccagattttaaagcacgtgcagaaacccaaacttttttaggtttaccgtcaactaggattctaactttttgaaggttagcgttccatctacgtttagtagagtttaaagcgtgtgaacgtctgttaccagtcgaagctttacgacctgttacgaaacattgtttacccatatgagtacctcctttaataaatataaatacacataactacttatatacttaattaagatagcatagtttcatttgaaaaacaatgaataattttcacataaaagtcaaaaatactgagttttgtgatataattgtagactgtgaagttatgtagtatgatattttagagaaataagtgaatgaaacatttaaaatttttatttaatgatactacatctattaaaagaaaacgcctatagataatcgtcatgagtgtaaattcagtttactcaaaatataataggtgatttaagcgtaagtcattctgataagttgtaccattgatattttataaaaataatcaatgaaacttaaagcgtttatgactacactaagtggtaaaattttaaaagtgattagggaaaacgaataataaactttgaaatttaggagggacaaagatatgacattagagatttcaaatgattacggtaaaattgatatttcaaacgaagtgattgcttcggttgtaggtggaaaggccgttgaatgttatggtattgtaggtatggcatctagacaacaagttagagatggtattgcggaaatactaggacatgaaaattatgctaaaggcatcaaagtaactgaaaataatggcgtagtggatatagatatgtacattattgtaagttacggtgtgaaaatatctgaagttgccaataatgtacaatcaacagtgaaatatactttggaaaaatcacttaatgtatcagtaaattcaatcaatatatatgtacaaggtgtacgtgtgaataatacaggcaagaaagcttaggaggacaacttgaaatgattagcaaaattaatggtaaattatttgccgatatgattatacaaggggcacaaaatttatctaacaatgcagatttggtagattctttgaatgtgtatccagtgccagatggtgatacaggaacaaatatgaatcttactatgacttcaggtcgcgaagaagtagagaataatttgtcgaaaaatatcggcgaattaggtaaaacattctcgaaaggtttactaatgggtgcaagaggtaactctggtgtcatcttgtcacaattattcagaggattttgtaaaaatattgaaagtgaatctgaaattaattcaaaattgttagctgaaagttttcaagctggtgttgaaacggcatataaagctgttatgaaaccagttgaaggtacaatacttacagttgcaaaagatgctgcgcaagctgcaatagaaaaagcaaataatactgaagattgtatagaattaatggagtacattattgtaaaagccaatgaatcacttgaaaacacaccaaacttattagctgtacttaaagaagttggtgttgttgatagtggcggtaaaggtttgttatgcgtttacgaaggattcttaaaagcgcttaaaggtgaaaaagttgaagccaaagttgcaaagatagataaagatgaatttgtacatgatgaacatgatttccatggtgtaattaatactgaagatattatttatggctattgtactgaaatgatggttcgttttggaaagaataaaaaagcctttgatgaacaagaattcaggcaagatatgagtcaatttggtgattctttattagtcattaatgatgaagaaattgtgaaagttcacgtgcataccgaatacccaggtaaagtgtttaattatggtcaacaatatggtgaattaattaaacttaaggttgaaaatatgagagaacagcaccgtgaagtgattcgaaaagaacagcacacagctaaaccgaaaatggaaacggttgaaacagcaattattactatttctatgggtgaaggtatttcagagatatttaaatcaatgggtgccacacatatcattagtggtggacaaacgatgaatccttctacagaagatatcgttaaagtcattgaacaatcaaaatgtaaacgtgcaattattttaccgaataataaaaatatcttaatggcaagtgaacaagcagcgagtattgttgatgcagaagctgttgttattccaacgaaatctattcctcaaggtataagcgcactattccaatatgatgtggacgcaacacttgaagaaaataaagcgcaaatggctgattcagtaaataacgttaaatctggttcattaacgtacgctgttcgtgatacgaaaattgatggcgttgagattaaaaaagacgcgtttatgggcttgattgaagataagattgtaagcagccaaagtgatcaattaacaacggttactgagttgttaaatgagatgttagcagaagatagtgaaatattgactgtgattattggtcaagatgcagagcaagcagttacagataacatgataaactggatcgaagagcaatatccagatgtagaagtggaagttcatgaaggtggacaaccaatttatcaatatttcttttcagtagaataaaaatttaaaataaaaaactaccaatgataaatcatcagttggtagttttttattttgctattttagtgatattgcgggttaaaagtatcgttctcgagttgctaacaatgtcatgttcaacttagtcatgataaaataaataacatactaaatgatacgtaaaatcaaataaaacataggtgatttattttggctaaagtaaacttaatagaaagtccatattctcttttacaattaaaaggtataggtcctaagaaaatagaagtattgcaacaactaaatattcatacagtggaagatcttgttctttatttgccaactagatatgaagataatacagtgattgatttgaatcaagcagaagatcaatctaacgttacgatagaaggacaagtatatacagctccagtagttgcattttttggaagaaataaatcaaaattaaccgttcatttaatggtaaataatattgctgtcaaatgtatttttttcaatcaaccgtatttaaaaaagaaaatcgaattaaatcaaactataactgttaaaggtaagtggaatagggttaaacaggaaattactggtaatagggttttctttaattcacaagggacacaaactcaagaaaacgcagatgttcaattagaaccagtctatcgtattaaggaaggtattaaacaaaagcaaatacgagaccaaattagacaagcgttaaatgatgtgacaattcatgaatggttaactgatgaactaagagaaaaatataaattagagaccttggactttactttgaacacattacatcatcctaaaagtaaagaggatttattacgtgctcgtagaacctatgcatttactgaactgtttttattcgaattacgtatgcaatggctaaatagattagaaaagtcatctgacgaagcaattgaaattgattatgacatagaccaagttaaatcatttattgatcgtttaccttttgaactaactgaagcacagaaatccagtgttaatgaaatttttagagatttaaaagcaccaatacgtatgcatcgattacttcaaggtgatgtaggttcaggaaaaacagtagttgctgcaatttgtatgtatgcgttaaaaactgctggttatcaatcagcattgatggtaccaactgaaattttagcagagcaacatgctgaaagtttaatggctttatttggagattctatgaacgttgcattgttaactgggtcagtaaaaggtaagaaacgaaagatacttttagaacaacttgaaaatggtacgattgattgtttaattggaacccatgctttgattcaagatgatgtgattttccataatgttggtttagtaattacagatgaacaacatcgatttggtgtgaatcaacgccagcttttaagagaaaaaggtgcaatgacgaatgtgttatttatgacagcaacgccgataccaagaacactagcaatatcagtttttggtgagatggatgtgtcttcaattaaacaattaccaaaaggtcgtaaacctatcattactacttgggcaaagcatgagcaatacgataaagttttgatgcaaatgacctcagagttgaaaaaaggtcgtcaagcatatgtcatttgcccgctaatagaaagttctgagcatctcgaagatgttcaaaatgttgtcgcattgtacgagtctttacaacagtattatggtgtttcccgtgtagggttattgcatggtaagttatctgccgatgaaaaagatgaggtcatgcaaaagtttagtaatcatgagataaatgttttagtttctactactgttgttgaagtaggtgttaatgtaccgaatgcaacttttatgatgatttatgatgcggatcgctttggattatcaactttacatcagttacgcggtcgtgtaggtagaagtgaccagcaaagttactgtgttttaattgcatcccctaaaacagaaacaggaattgaaagaatgacaattatgacacaaacaacggatggatttgaattgagtgaacgagacttagaaatgcgtggtcctggagatttctttggtgttaaacaaagtggattgccagatttcttagttgccaatttagttgaagattatcgtatgttagaagttgctcgtgatgaagcagctgaacttattcaatctggcgtattctttgaaaatacgtatcaacatttacgtcattttgttgaagaaaatttattacatcgtagttttgactaattgccatgctgatttgtcaatttgagtgcaacacttcgttaattgagtgatatgacacttgaactatttaaatgtaaagtggtattttaacaatttataaattttcgactaaataatagctaaatattacagttatttgttgagtcggttaaatagaaagtgttatgatatgtgaggaatgtttaagactaggtactaaaaaatgaggggtgagacgttgaaactaaagaaagataaacgtagagaagcaatcagacaacaaattgatagcaatcccttcatcacagaccatgaactaagcgacttatttcaagtgagtatacaaacaattcgtttagatcgcacttatttaaacataccagaattaaggaagcgtattaaattagttgctgaaaagaattatgaccaaataagttctattgaagaacaagaatttattggtgatttgattcaagtcaatccaaatgttaaagcgcaatcaattttagatattacatcggattctgtttttcataaaactggaattgcgcgtggtcatgtgctgtttgctcaggcaaattcgttatgtgttgcgctaattaagcaaccaacagttttaactcatgagagtagcattcaatttattgaaaaagtaaaattaaatgatacggtaagagcagaagcacgagttgtaaatcaaactgcaaaacattattacgtcgaagtaaagtcatatgttaaacatacattagttttcaaaggaaattttaaaatgttttatgataagcgaggataaaattatggttaaattagcaattgatatgatgggtggcgacaatgcgcctgatatcgtattagaagccgtacaaaaggctgttgaagactttaaagatctagaaattatacttttcggtgacgaaaaaaagtataatctgaaccatgaacgaatcgaatttagacattgttctgaaaagattgaaatggaagatgagcctgttagagcgattaaacgtaaaaaagatagctcaatggtaaaaatggctgaagctgtgaaatctggtgaagcagatggatgtgtgtcagcaggtaatactggtgctttaatgtcagctggtttattcattgttggacgtattaaaggtgtagctagaccggctttagtagtaacattgccaacgattgatggaaaaggttttgtctttttagacgttggtgcaaatgctgatgctaaacctgaacacttattacagtatgcgcaactaggggatatttatgctcaaaaaattagaggtattgataatccgaaaatctcattattaaatataggaaccgagccagctaaaggtaatagtttaacgaaaaaatcatatgagttattaaatcatgatcattcattgaattttgttgggaatattgaagcgaagacattaatggatggcgatacagatgttgtagttaccgatggctatactgggaacatggtccttaaaaatttagaaggtactgcaaaatcaatcggtaaaatgttaaaagatacgattatgagtagtactaaaaataaattagcaggtgcaatattgaagaaagatttagctgaattcgctaaaaagatggattactcagaatacggtggttccgtattattaggattggaaggtactgtagttaaagcacacggtagttcaaatgctaaagctttttattctgcaattagacaagcgaaaatcgcaggagaacaaaatattgtacaaacaatgaaagagactgtaggtgaatcaaatgagtaaaacagcaattatttttccgggacaaggtgcccaaaaagttggtatggcgcaagatttgtttaacaacaatgatcaagcaactgaaattttaacttcagcagcgaacacattagactttgatattttagagacaatgtttactgatgaagaaggtaaattgggtgaaactgaaaacacacaaccagctttattgacgcatagttcggcattattagcagcgctaaaaaatttgaatcctgattttactatggggcatagtttaggtgaatattcaagtttagttgcagctgacgtattatcatttgaagatgcagttaaaattgttagaaaacgtggtcaattaatggcgcaagcatttcctactggtgtaggaagcatggctgcagtattgggattagattttgataaagtcgatgaaatttgtaagtcattatcatctgatgacaaaataattgaaccagcaaacattaattgcccaggtcaaattgttgtttcaggtcacaaagctttaattgatgagctagtagaaaaaggtaaatcattaggtgcaaaacgtgtcatgcctttagcagtatctggaccattccattcatcgctaatgaaagtgattgaagaagatttttcaagttacattaatcaatttgaatggcgtgatgctaagtttcctgtagttcaaaatgtaaatgcgcaaggtgaaactgacaaagaagtaattaaatctaatatggtcaagcaattatattcaccagtacaattcattaactcaacagaatggctaatagaccaaggtgttgatcattttattgaaattggtcctggaaaagttttatctggcttaattaaaaaaataaatagagatgttaagttaacatcaattcaaactttagaagatgtgaaaggatggaatgaaaatgactaagagtgctttagtaacaggtgcatcaagaggaattggacgtagtattgcgttacaattagcagaagaaggatataatgtagcagtaaactatgcaggcagcaaagagaaagctgaagcagtagtcgaagaaatcaaagctaaaggtgttgacagttttgcgattcaagcaaatgttgccgatgctgatgaagttaaagcaatgattaaagaagtagttagccaatttggttctttagatgttttagtaaataatgcaggtattactcgcgataatttattaatgcgtatgaaagaacaagagtgggatgatgttattgacacaaacttaaaaggtgtatttaactgtatccaaaaagcaacaccacaaatgttaagacaacgtagtggtgctatcatcaatttatcaagtgttgttggagcagtaggtaatccgggacaagcaaactatgttgcaacaaaagcaggtgttattggtttaactaaatctgcggcgcgtgaattagcatctcgtggtatcactgtaaatgcagttgcacctggttttattgtttctgatatgacagatgctttaagtgatgagcttaaagaacaaatgttgactcaaattccgttagcacgttttggtcaagacacagatattgctaatacagtagcgttcttagcatcagacaaagcaaaatatattacaggtcaaacaatccatgtaaatggtggaatgtacatgtaatatatttgagctaaagctcattgacgcagtggttgactggtcatccaatggagaattgtctgacctagtcaactttgcgggggaaattctaagcaacctagataaggttccagaatttctccctaagaaacactaatcaataaattgataagtgtttctaaaatttctacttgttttttagaatttaaaatgggaaaatatagtagtctatgtataggcatttttaaaggaggtgaatcgacgtggaaaatttcgataaagtaaaagatatcatcgttgaccgtttaggtgtagacgctgataaagtaactgaagatgcatctttcaaagatgatttaggcgctgactcacttgatatcgctgaattagtaatggaattagaagacgagtttggtactgaaattcctgatgaagaagctgaaaaaatcaacactgttggtgatgctgttaaatttattaacagtcttgaaaaataataaatcttacatctgggtcgtcagtattgtcgactcagtttttttctttaattatcaatagttttaacgtaaaattaaagatgattcaagagcaacacataaaggagataaaataatgtctaaacaaaagaaaagtgagatagttaatcgttttagaaagcgctttgatactaaaatgacagagttaggctttacttatcaaaatattgatttataccaacaagcattttcgcattcgagttttattaatgattttaatatgaatcgtttagaccataatgagcgtttagagtttttgggtgatgcggtattagaattgacggtttcacgatatttatttgataaacatcccaacttgccagaagggaatttaacaaaaatgcgtgccactattgtatgtgagccctcacttgtaatatttgcgaataaaattggattgaacgaaatgattttacttggtaaaggtgaagagaaaacagggggacgtacaagaccatcattaatatcagatgcattcgaagcatttattggggcattgtatttggatcaaggactagatatagtttggaaatttgctgagaaagtcattttcccacatgtagaacaaaatgagttattaggcgtggtagattttaaaacacaattccaagaatatgtgcaccagcaaaataaaggtgatgtaacctataatttaataaaagaagagggaccggcacatcatcgtctattcacttcagaagttattctgcaaggggaagcaatagctgaaggtaaagggaaaacgaaaaaagaatcagaacaacgtgctgctgaaagtgcctataagcaattaaaacaaattaaatagaaatttatatgatacgacatataggtgttcgatttaggatttaaggaagaatttttaatattttatggaacaacttcgaaatttaatatacaaatactaaaatatcgtatacatgtgttctttaaaattgtgataaggagtttaggatggtttatttaaaatcaatagatgccattggatttaagtcttttgcagatcaaaccaatgttcaattcgataaaggtgtaactgcaattgttggtccaaatggaagcggtaaaagtaatattacagatgctattaaatgggtgttgggtgaacaatcggctaaatcattacgtggctcaaaaatggaagatattatcttctcaggtgcagaacatcgcaaagctcaaaattatgctgaagtacagttaagattagataatcattctaaaaagctcagtgttgatgaaaacgaagttattgtaacaagaagattgtatcgaagtggtgaaagtgagtactacataaataatgaccgtgcaagattaaaagatattgccgatttatttttagattctggattgggaaaagaagcgtatagcattatctcgcaaggtagagttgatgaaatactaaatgctaaaccaattgatagacgtcaaattattgaagaatcggctggtgtacttaaatataaaaaacgtaaggctgaatcattaaataaacttgaccaaacagaagataatttaacgagagtagaagacattttatatgatttggaaggtcgcgtagaacctctaaaagaggaggcagctatagctaaagaatataagacactttcacatcaaatgaaacatagtgacattgtagttacagtgcacgatattgatcaatatacaaatgacaatagacaattagatcaacgtttaaatgatttacaaggccaacaagcaaataaagaagctgacaagcaacgtttaagccaacaaattcaacaatataaaggtaaacgtcatcaacttgataatgatgttgaatcgcttaattatcaattagtaaaagctacggaagcctttgaaaaatatacgggacaattaaatgttttggaagaacgtaagaaaaatcaatctgaaacaaatgcacgatatgaagaagaacaagaaaatttaatggagcttttagaaaatatatcaaatgagatttctgaagctcaagatacttataagtctctgaaaagtaaacaaaaagaactcaatgctgtcattcgtgaacttgaagaacaactatatgtttcagacgaagcacatgatgaaaaattggaagaaattaaaaacgaatactatacattaatgtcagagcaatcagatgttaacaatgatattcgttttttaaagcatactatagaagagaatgaggctaaaaaatcaagactagattctcgattagttgaagtttttgagcaattgaaagatattcagggtcaaataaaaacgacaaaaaaagaatatcaacagaccaacaaagaactttctgctgtagataaagaaattaaaaatatagaaaaagacctcactgatacaaaaaaagcacaaaatgaatacgaagagaaattgtatcaagcatatcgatataccgaaaaaatgaaaacacgtattgatagtttggcaacgcaagaggaagaatatacttattttttcaatggcgtcaaacatattttgaaagctaaaaataaagaattaaagggtatttatggtgcagttgcggaaattattgatgtgccatctaaattaactcaggcaattgaaacagcattaggtgcttcattacaacatgtcattgtagattcagaaaaagatggacgccaggctattcaatttttaaaagaacgtaatttaggtcgtgcgacgtttttaccattaaatgttatacagagtagagtggtagcgactgatattaaatctattgctaaagaggcaaacggatttattagtatcgcttcggaagcagttaaagtagcaccagaatatcaaaatattatcgggaatttattaggtaatacgattatcgttgatcatttaaagcatgcaaatgaattggcacgtgcgattaaatatcgaactcgtattgttactttggaaggtgatattgtaaatcctggtggttctatgactggtggtggcgctcgtaagtcaaaaagtattctgtctcaaaaagacgagttgacaacaatgagacaccaattagaagattacttgcgtcaaacagaatcatttgaacaacaatttaaagagttgaagataaaaagtgatcaattaagtgaactgtattttgaaaaaagtcaaaagcataatacacttaaagagcaagtgcatcattttgaaatggagctcgatagattaactacacaagaaacacaaataaaaaatgatcatgaagaattcgaatttgaaaaaaatgatggttatacgagtgacaaaagtcgacaaactttgagtgaaaaagaaacttatctagaaagtattaaagcatctttaaaacgactagaagatgaaattgaacgctacacaaaactttctaaagaaggtaaggaaagcgttactaaaacacaacaaaccttacatcagaaacaatctgatcttgctgtggttaaagagcgtattaaaacacaacaacagacaatagatcgattaaataatcaaaatcaacaaactaaacatcaattaaaagatgttaaagaaaaaattgcattctttaattcggatgaagtgatgggcgaacaagcttttcaaaatattaaagatcaaattaatggtcaacaagaaacgagaacacgcttatcagatgaattagataaattgaaacaacaacgtattgagttgaatgaacaaatcgatgcgcaagaagctaaactacaagtttgtcaccaagatattttagctatcgaaaatcactaccaagatattaaagctgaacaatcaaagctagatgtattaattcatcatgcgatagatcatttaaatgatgaatatcaattgactgttgaacgtgcgaaatctgaatatacgagtgatgaatcgattgacgcattacgtaaaaaagttaagttaatgaagatgtcgattgatgaactaggtcctgtaaacttaaatgcaattgaacaatttgaagagttaaatgaacgttatacatttttaagtgaacaacgtacagatcttcgtaaagctaaagaaacattagagcaaattataagtgaaatggatcaagaggttactgaaagatttaaagaaactttccatgctattcaaggacattttacagctgtgttcaaacaattgtttggtggaggcgatgcagaattgcaattaactgaagccgattatttaacagctggtattgatattgtggtacaaccaccgggtaaaaagttgcaacatttatcgttactgagtggtggtgagcgtgcattaactgctattgctttactatttgcaattttaaaagtaagatctgcaccttttgttatattagatgaggttgaagctgcactagatgaagcaaatgttattagatacgcaaaatatttaaatgagttatcagacgaaacacaattcattgttattacacaccgtaaaggaacaatggaatttgcagataggttatacggtgtaacaatgcaagaatcaggtgttactaaacttgtgagtgtgaatttaaatacaatagatgatgtgttgaaggaggagcaataatgagcttttttaaacgcttaaaagataagtttgcaacaaataaagaaaatgaagaagttaaatccttaacagaagaacaaggtcaagacaaattagaagatacacattctgaaggttcaacgcaggacgcaaatgatttagcagaaaatgctgaagtgaaaaagaagccacgcaagttgagtgaagcggattttgatgacgatggcttaatatcaattgaagattttgaagaaattgaagctcaaaaaatgggtgctaaatttaaagcaggactcgaaaaatctcgtcaaaatttccaagaacaattaaataatttgatagcgagatatcgtaaagtagatgaagacttttttgaagctttagaagaaatgttaatcactgcagacgtcggttttaatacagtgatgacgttaactgaagaattacgtatggaagcacaacgacgtaatattcaagatactgaagatttgcgtgaagtcattgttgaaaagatcgtagagatttaccatcaagaagatgataattcagaagctatgaacttagaagatggtcgtttaaatgtcattttaatggttggtgtgaatggtgttggtaaaacaacaacaattggaaaattagcttaccgatataaaatggaaggtaaaaaagtaatgttagctgcgggcgatacttttagagcgggtgctattgatcaattgaaagtttggggcgaacgtgttggtgtagacgtaattagccaaagtgaaggttctgatccagctgctgttatgtatgatgcgattaatgccgctaaaaacaaaggtgttgatattttaatctgtgataccgctggacgtttacaaaataaaacaaatctaatgcaagaattagaaaaagttaagcgtgtaattaatcgagcagtgccagatgcgcctcatgaagcattactatgtttagatgctacaactggtcagaatgcgttgtcacaagctagaaactttaaagaagtaacaaatgttacaggtattgtattaacgaaattagatggtacagccaaaggtggtatcgtattagccattcgtaatgaattgcacatcccagttaaatatgtaggtttaggtgagcaattagatgacttacaaccatttaaccctgaaagttatgtctacggcttattcgctgatatgattgaacaaaatgaagaaataacaacagttgaaaatgatcaaattgtaacagaagaaaaggacgataatcatgggtcaaaatgatttagttaaaacgttacgaatgaattatttgtttgatttttatcaatccttattgacgaataaacaacgtaattatttggaattattttatcttgaagattattctttaagtgaaatcgcagatacttttaatgtgagtagacaagcagtttatgataatataagaagaactggcgatttagttgaagattatgaaaagaaattggaattataccagaaatttgagcaacgccgagaaatatatgatgaaatgaaacaacatttaagtaatccagaacaaatacaacgttatattcaacaattagaagacttagaatagatataaattgagggaggacatcgatatggcatttgaagggttatcagaacgcttgcaagcgacgatgcaaaaaatgcgtggtaagggtaaacttactgaagctgatataaagataatgatgcgtgaagtaagattagcgttacttgaggctgacgtaaactttaaagtggtaaaagaatttattaaaacagtatcagaacgcgcattaggttccgatgtaatgcaatcattaacaccagggcaacaagttattaaaatagttcaagatgaattaacgcagttgatgggtggagaaaatacgtcgattaatatgtcaaataaaccacctactgttgttatgatggttggtttacaaggtgctggtaaaacaacaactgcaggtaaattagcattattgatgcgtaaaaaatacaacaaaaaacctatgttagttgcagcagatatttatcgtccagcagcgataaatcaattacaaacagtagggaaacaaattgatattcctgtatacagtgaaggagatcaagtaaagccacaacaaattgtaactaatgcattaaaacatgctaaagaagaacatttagactttgtaatcattgatacagcaggtcgattacacatcgatgaagcattgatgaacgaattaaaagaagtaaaagacattgctaaaccaaacgaaattatgttagttgtcgattcaatgacgggtcaagatgctgtcaatgttgcagaatcttttgacgatcaacttgatgtcacaggtgttaccttaactaaattagatggtgatacacgtggtggtgcagctttatctattcgttcggtgacacaaaaaccaattaaatttgttggtatgagtgaaaagttagatggtttagagctattccatcctgaacgtatggcatcacgtattttaggtatgggtgatgtgttaagtttaattgaaaaagcgcaacaagatgtggatcaagaaaaagcaaaagatttagagaaaaagatgcgtgagtcatcgtttactttagatgattttttagaacaacttgatcaggtgaaaaatctaggaccactggatgatattatgaaaatgattccaggtatgaataaaatgaaagggctagataagcttaatatgagtgaaaagcaaattgatcatattaaagcgattatccagtcaatgacgccggctgaaagaaacaatccagacacattgaatgtatcacgtaaaaagcgtattgctaaagggtctggtcgttcattacaagaagtcaatcgtttgatgaaacaatttaacgatatgaagaaaatgatgaaacagttcactggtggcggtaaaggtaaaaaaggtaaacgcaatcaaatgcaaaatatgttaaaaggtatgaatttaccgttttaatgtttaatataacacgctgatttttgttgcaatgagatgtgcatcccgaaagttatactaaagaatataactttatggggtgcatatttttagatacacaataataattaaaaactgaaattgctgatttgctagaacatgaggttattgttgctaatattaataagttatattgggggaacgtgtgcggtagaagtggtaccattcatgtccttacgagataaattaacttaacacgtaggtggtgaaatttactatgaatttttataacctattaacagtctaatttagtaatcacatagttattattgtaagaaaaaggttcaataattttcctggtaaagaaaaaactctttacaaacattcatacacctgttaatattatttcttgtagaaaataaaaattaaaacatgacttaaaggagattttataaatggcagttaaaattcgtttaacacgtttaggttcaaaaagaaatccattctatcgtatcgtagtagcagatgctcgttctccacgtgacggacgtatcatcgaacaaatcggtacttataacccaacgagcgctaatgctccagaaattaaagttgacgaagcgttagctttaaaatggttaaatgatggtgcgaaaccaactgatacagttcacaatatcttatcaaaagaaggtattatgaaaaaatttgacgaacaaaagaaagctaagtaatttagcgtaaaattgttctaacaataagaataactcgtttacactgacagttattactcaatgatacgttgggaatatcacatgttagtaatatagaacgtattgggtaccataatggtgccctttttctttgaattattttcaattaaaatagaagtgttcaaagcatagagttggaggtaatagaatgagagttgaagttggtcaaattgttaacacacatggtattaaaggtgaaattaaagtaaaatccaattcagactttacagacgttcgttttcaacccggtcaagtgctgacagttgtgcataacaataacgaccttgaatatactgttaagtcacatagagtgcataaagggcttcatatgcttacatttgaaggtattaataatattaatgatattgagcatttaaaagggagttctatttatcaagagcgtgatcatgaagatatcgtacttgaggaaaatgaattttattattcagatattataggatgtgcagtttttgatgatcaaaaaacaccaataggtcgtgtaattaatatatttgaaacaggtgcgaatgatgtgtgggtgattaaaggatctaaagaatatttgattccttatattgctgatgttgtaaaagaagtggatgttgaaaataaaaaaattatcatcacgccaatggaaggattgttggattaatgaaaattgattatttaactttatttcctgaaatgtttgatggtgttttaaatcattcaattatgaaacgtgcccaagaaaacaataaattacaaatcaatacggttaattttagagattatgcaattaacaagcacaaccaagtagatgattatccgtatggtggcggacaaggtatggtgttaaagcctgaacctgtttttaatgcgatggaagacttagatgtcacagaacaaacacgcgttattttaatgtgtccacaaggcgagccattttcacatcagaaagctgttgaattaagcaaggccgaccacatcgttttcatatgcggacattatgaaggttacgatgaacgtatccgaacacatcttgtcacagatgaaatatcaatgggtgactatgttttaactggtggagaattgccagcgatgaccatgactgatgctattgttagactgattccaggtgttttaggtaatgaacagtcacatcaagacgattcattttcagatgggttattagagtttccgcaatatacacgtccgcgtgaatttaagggtctaacagttccagatgttttattgtctggaaatcatgccaatattgatgcatggagacatgagcaaaagttgatccgcacatataataaaagacctgacttaattgaaaaatatccattaactaatgcagataagcaaatattagaaagatataaaataggattgaaaaaaggttagtattgtgctaacataatctgagtgtggaaacactaaaatcactatgatccgctgctatatatttgtcgaggcaagaacataggttgaagaggagaatttataatgacaaatcacaaattaatcgaagcagtaactaaatcacaattacgtacagacttaccaagtttccgtcctggtgatactttacgtgtacacgtacgtatcattgagggtactcgtgagcgtatccaagtattcgaaggcgttgtaattaaacgtcgtggcggtggcgtttctgaaacgtttacagttcgtaaaatttcatcaggtgttggcgtggaacgtacattcccattacacacaccaaaaattgaaaaaatcgaagttaaacgtcgtggtaaagtacgtcgtgctaaattatattacttacgtagtttacgtggtaaagctgctagaatccaagaaattcgttaatcagcatttaaacaaagctatgtatgagtcaaattcgactcaaacaataaagccatctaggtcacttttatggagtgatatagatggctttttttgctgtttagttaatgtaaagttgataatgtaattgtttattccttctctattcataacgtgtttgctcaaaatggttatataaacaaaaatctactaagtgccattgaaaaggacttagtagatttattaaatatatgcgtagcaacattatttttgtcttgcccatctcgtgaaaataatactacatataatgccaaatatagtaattgttataagtaaataatagtatggtggggtatagctcaattgaatctttgttatatttttaggtgctttaatgccggtcataacaccatttacttgttcaactttaagactttgatcacctgatgtcgctttcataccttgattatatgctgttggcaaaacaatatacccagatgaatttttatttttagtaatagtataaccatgctttgtcttactaactttgacagcttctaatgaatttgaagcgtctttaagcgtggtataatcttcgccgtatatcccttttaaatttactcgatacttacctttaggcaatgataatctaattctatctggagctttaatgcgtatcgttacgggtgttacaacgcgtcgatatttataagtgagtttatttctttcttgtgtatattcattcactttaacatcatgagctttatccggcgaaagtaattctaaatccatttcaaaatacaaatctttaaattgattagaaactgattttggcaactgtacagttagaccaccattattttgtttaacttgtaataaatgttttgtaggagattgccaggctgcactatttaatttaattgttgaatctgatagtaaatttttattggctttaaaatgtgtattaacatctttaatattgttagaaacaatcccttgcaacattgcttgttctttatctaatggagattttaattctttattggaaaagaccttatttgtaatatgtgcacttggataatggatggtatttttagaatgaatccaacgaactttattgtctttgtgttcagacttaattttaaatccatatggtaagttgtcatcatgattcactctaattcgatcattaacattccaaagtgatagtaaattttgacgattgccaagtaatctataagtgctgtttttatcgattggcatattaatttggagtgtcttgtcataatattttaaaatgtctccattaaaaatactagaatataatgaaatgccattataatgatatataaatggtgaatttaatgcatagtctgacatataatcaatgcgattaaatgagcctgttgcattttgatttatcttttttataagctggtttacatagttactatggtaatcatgttgtttcaacgttgataatgattgttgataaggtttgattgccatgtttttgttgttatctaaaatgacgatttgttgaatcataacgattaatactaatattgcaacggttaattttttataacgccataaactaaattttaaaataacggcaagcactattagcaggataatacctactataagtgcaagtgggtgtgtcggtgatagtaatacataaagtattgcgatgatgcatacgggtattgttctgattaaataatatttcatatttaatgttgataaatgttgaataaacaatccgcaaagagcacttgatgatagtgctaagatatacacccaacgcctttctggaaatgaaaaaccattaaaagcactgtcgaaatactgtgataatgaacctataaataatatccatgttactattgcgaaaagtctataaaagtaaaaacgatacagtttgaatgacaataatgcaacgatagtaagaattgaaatcgtaatataaaatccatcgctaaagaaaaaataatgataatcaagtggtgtcaaaaacggtatatcaacattgggattttgctttctgtcattttccaaaaacgcagaaatgccagtgaataaaccaaatacacttgataacacactcaaaactgtagcagatatgacgcaaattaatttttgtgttctagagacaatgtcatatttgtaagtgaaaatgagtcgatataaatagtagcaacctataataatagcttgataataactgaaataaaaattgctaaatagtgttaaggctatcgcaacaatgaaaataccgattttgcgttgttgaaaatatctttccaaaccaagaatcgataatggcaataaatataataaatttccataaaatgaccaagtaaaattaaagtatataacgacagttgacatgccgtataaaatcgtagcgatcatatttgctgagcgtttaaagtgtaatattttaaataagtagaaggtcacgacaaatgttatgatagctcgtatcatagccataataagttggtttgtcggccaaaaatgtattgtcgtcggattaaatataccaaccgtttctcctattttaatgaatagaaaatttagccacattaaaggtgacagcgaataataatatgatagtcctttcatataatcgccacctaatccaaacgatgcatcatataaactagaaaaactacgtagatgttcatacaaatacatttgaaatggcatcatttgacggaatccatctccagccccgctaaaaacagtaccattcacaatataatcatagatatgagtagaaaataaaataagcgttaatattacactaatgaaagttataacaaagaattgtttgacgtttgaatttagccacttttttaacacaacattatcctcaactttcaaatttaaaattaagtttaactgaaactaaagttaatgaggttcttgataggtaaagacgaagatgactgtggaacagataccttatcatagttacttaaactttggatcattttcagtttatcattaaacaaatatattgaataataaaaatgtcatactgataaagatgaatgtcacttaataagtaacttagatttaacaaatgatgatttttaattgtagaaaacttgaaataatcacttatacctaaatctaaagcattgttaagaagtgtgacaatgttaaaataaatatagttgaattaatgaatttgttctataattaacaggttatagattttaataatgagaaaagaattgacgaaagtaaggtgaattgaatggttattcaatggtatccaggacatatggcgaaagccaaaagagaagtaagtgaacaattaaaaaaagtagatgtagtgtttgaactagtagatgcaagaattccatatagttcaagaaaccctatgatagatgaagttattaaccaaaaaccacgtgttgttatattaaataaaaaagatatgtctaatttaaatgagatgtcaaaatgggaacaattttttattgataaaggatactatcctgtatcagtggatgctaagcacggtaaaaatttaaagaaagtggaagctgcagcaattaaggcgactgctgaaaaatttgaacgcgaaaaagcgaaaggacttaaacctagagcgataagagcaatgatcgttggaattccaaatgttggtaaatccacattaataaataaactggcaaagcgtagtattgcgcagactggtaataaaccaggtgtgaccaaacaacaacaatggattaaagttggtaatgcattacaactattagacacaccagggatactttggcctaaatttgaagatgaagaagtcggtaagaagttgagtttaactggtgcgataaaagatagtattgtgcacttagatgaagttgccatctatggattaaactttttaattcaaaatgatttagcgcgattaaagtcacattataatattgaagttcctgaagatgcagaaatcatagcgtggtttgatgcgatagggaaaaaacgtggcttaattcgacgtggtaatgaaattgattacgaagcagtcattgaactgattatttatgatattcgaaatgctaaaataggaaattattgttttgatatttttaaagatatgactgaggaattagcaaatgacgctaacaattaaagaagttacgcagttgattaatgcggttaatacaatagaagaattagaaaatcatgaatgctttttagatgagcgaaaaggtgttcaaaatgccatagctaggcgcagaaaagcgttagaaaaagaacaagctttaaaagaaaagtatgttgaaatgacttactttgaaaatgaaatattaaaagagcatcctaatgctattatttgtgggattgatgaagttggaagaggacctttagcaggtccagtcgttgcatgcgcaacaattttaaattcaaatcacaattatttgggccttgatgactcgaaaaaagtacctgttacgaaacgtctagaattaaatgaagcactaaaaaatgaagttactgcttttgcatatgggatcgcgacagctgaagaaatagatgaatttaatatttataaagctactcaaatcgccatgcagcgagctattgatggattatcagtacaaccaacgcatttattgatagacgcgatgacgcttgataatgcactgcctcaagtatctttaatcaagggtgatgcaagaagtgtgtccattgcagctgcaagtatcatggcaaaggtttttcgtgatgattatatgacacagttatctaaagattatcctgaatatggttttgaaaaaaacgcgggttacggtaccaaacaacatttactagcaatcgatgatattggcattatgaaagagcatagaaaaagctttgaacctataaaatcgttactgtaaatcgtaaaattcaattaaatgataaaaaagtagcatttaagtttacaatagcgcttacattttttataattgtaagggaacttaacctaagtaacaggaggatggaagatgaatatccacgagtatcaaggtaaagaaatatttcgttcaatgggcgttgcagttccagaaggacgagtagcatttactgctgaagaagcggtggagaaagcaaaagaattaaattctgatgtttatgttgtaaaagcacaaattcatgctggaggtagaggtaaagcaggcggagtaaaaattgctaaatctttatctgaggtagaaacatatgcaaaagaattattagggaaaactttggtgacacatcaaactggtccagaaggtaaagaaattaagcgtttatatatcgaagaaggttgtgctattcaaaaagaatattacgttggattcgttattgatcgtgcgactgaccaagtaacattgatggcgtctgaagaagggggcactgagattgaagaagttgctgcgaagactcctgaaaagatcttcaaagaaactatcgatccagtaatcggactttcaccattccaagcaagacgaattgcgtttaatattaatattcctaaagaatctgttaacaaagctgctaaattcttattagcactttataatgtattcattgaaaaagattgttcaatcgtagaaatcaacccattagttacaacagctgatggtgatgtattggcattagatgctaaaattaattttgatgataatgcattattcagacataaagatgttgtagaattacgtgatttagaagaagaagatccgaaagagattgaagcgtctaaacatgatttatcatacattgcattagatggtgacatcggatgtatggttaatggtgcaggtttagccatggcaacaatggatacgattaatcatttcggtggaaacccagccaatttcttagatgcaggcggaagcgctactagagaaaaagtaactgaagcatttaaaatcattttaggtgatgaaaatgttaaaggtatttttgtaaacattttcggtggcattatgaaatgtgatgttatcgcagaaggtatcgttgaagctgtaaaagaagtagatttaactttaccactagttgtacgcctagaaggtacaaatgttgagttaggtaaaaaaatcttaaaagactcaggattagcaattgaaccagcagcaacaatggctgaaggtgcacaaaaaattgttaaactagtcaaagaagcataaggaaaggatgggagcactaagatgagtgtatttatagataagaatactaaagtaatggtacaaggtattacagggtctactgcccttttccatacaaaacaaatgcttgattatggtacgaaaatagtagcaggtgtgacgcctggtaaaggtggtcaagttgttgaaggcgttcctgttttcaacactgttgaagaagctaaaaatgaaactggggcaacggtttcagtcatttacgttccagcaccatttgctgcagactcaattttagaagcagctgatgcagacttagatatggttatttgtatcactgaacatattcctgtattagacatggttaaagttaaacgctacttacaaggtagaaaaacacgtttagttggtccgaactgtccaggtgtgattacagcagatgaatgtaaaattggtattatgcctggctatattcacaaaaaaggtcatgttggtgtagtatctcgttcaggtacattaacatatgaagcagtgcaccaattgactgaagaaggtattggtcaaactacagctgttggtattggtggagacccagtcaacggaacaaactttattgatgttttaaaagcattcaatgaagatgacgaaacgaaagcagttgttatgattggtgaaatcggtggtacggctgaagaagaagcagctgaatggattaaagcgaatatgacaaaaccagttgtaggctttatcggtggacaaacagcacctcctggaaaacgtatgggacatgctggtgcaatcatttcaggtggtaaaggtactgctgaagagaaaattaaaacattaaatagttgtggtgtgaaaacagcggcaacaccttcagaaattggttcaacattaattgaagctgctaaagaagcaggtatttatgaatcattattaactgttaataaataaagttaaaagatgatataaatggctatagcccattccatactttataaaagtatcggaaatgggctatttgtcgtgcgatgaattttagtacacttttcatattttggaaagacaagttaattattttacctcctacaatagctttataaaacaaagaaaattttaattaaaatatatagcgcactatgttataatgtttgtatattattgtaaggagtgtttcatcatgaataaacaacaaagtaaagtacgctattcaattagaaaagttagtattggaattttgtcaatttcaataggtatgtttttggcattgggtatgtcgaacaaagcatatgcagatgaaattgataaatctaaagattttacaagagggtatgagcaaaatgtattcgcgaaatcagagttaaatgctaataaaaatacgacaaaagacaaaataaaaaatgaaggtgctgttaaaacatcggacacaagtttaaagttagacaacaaatcagcaatttcaaacggaaatgaaattaatcaagatataaagatttcaaatactccgaaaaactcaagccaaggtaacaatctagttattaataacaatgaacttactaaagaaattaaaattgcaaacttggaagctcaaaattctaatcagaagaaaacgaataaagttactaataattactttggttactacagttttagagaagctccaaaaacacaaatctatactgtaaaaaaaggagacacacttagtgctatagcattaaaatacaaaactacagtttcaaatattcaaaatacaaataatatagcaaatcctaatttaatatttattggtcaaaaattaaaagtgccaatgacaccattagtagaaccaaaaccaaaaacagtgtcttcaaataataaaagtaatagtaatagcagtacattaaattatttgaaaacattagagaatagaggatgggatttcgacggtagttatggatggcaatgtttcgatttagttaatgtatattggaatcatctttatggtcatggattaaaaggatatggagctaaagatataccatatgcaaataattttaatagtgaagctaaaatttatcacaacacaccaactttcaaagctgaacctggggacttagtggtttttagtggaagatttggtggaggatatggtcatacagctattgtcttaaatggtgattatgatggaaaattaatgaagttccaaagtttagatcaaaactggaataatggtggatggcgtaaagcagaggttgcacataaagttgttcataattatgaaaatgatatgatttttattagaccatttaaaaaagcataatttaaatcgaaggcaggacattgaaatatgaaattttcaactttaagtgaagaagaatttaccaactacaccaaaaagcacttcaaacattatacgcagtctatagaattatataattatagaaataaaataaatcatgaagcacatattgtgggagtgaagaatgataaaaatgaagttatagctgcatgtttattaacagaggcacgaatttttaaattctacaaatatttctactctcatagaggtcctttacttgattatttcgatgctaaattagtttgttacttttttaaagaattatctaaattcatttataaaaatagaggagtatttattcttgttgatccatatttaatagagaatttaagagatgcaaatggtaggataataaagaattataataattcagtgatagtaaagatgctagggaaaattgggtatctccatcaaggttatacaacaggatattcaaataaaagtcaaattaggtggatttctgtattggatttaaaagataaagatgagaatcaacttttaaaagaaatggaataccaaactagaagaaatataaaaaagactattgagattggtgttaaggttgaagatttatctattgaagaaacaaatcgattttataaattgtttcaaatggctgaagaaaaacatggttttcatttcatgaatgaagattattttaaacgaatgcaagaaatatataaagataaggcaatgttaaagatagcttgtataaatcttaatgaatatcaagataaattaaaaatacaattattgaaaatcgaaaatgaaatgatgactgtgaacagagcattaaatgaaaatccaaattctaaaaaaaataaatcaaaattaaatcagttaaatatgcaattatctagtattaataatagaattagtaaaaccgaagaactaatatttgaagatggacctgttttggatttagctgctgctttatttatatgtactgatgatgaagtttattatctatcaagtggatcaaatccgaaatataatcagtatatgggtgcatatcatctacaatggcatatgataaaatatgcaaaatcacataatattaataggtataatttttatggaataacaggcgtctttagtaatgaggcggatgattttggtgttcaacaatttaaaaagggttttaatgcacatgttgaagaattaattggtgatttcatcaaaccagtaagaccaattctatataaatttgcaaaacttatttataaggtttaattataaagtatgttggaaattgaaattttaaattctttccaacatacttttcactttttaagtcagtatttttactccttaaaataacattacatcgacaatgtttttgtattagaaatgtaaaacaaaaatagaatatgattttgtatgattacaaaaaggagttgatttattgattaaactatttttgcttaagttatactgggcacacttttcgactaaacaaattcatcaatttttaatggcatatcctaatgtaattaaagaggagggaagaaaaaaagatagttatttatgtgaatgggtgaatagggaagaaaatgttcatttattacgtaaatactatgcttttataaaacttgatcataacgatattattaaagaactgcagaaattaaaagtaagttacattacatatatggattctgaatacccagtgctattaaaagaaatatatcaatttccattacttcttttctataaagggaacatcaaattaataaataatatgcatcatttggcagtagtaggtgcaagagattctacaagttatacccaacagtctttagaatttttattatcaaatgataaaagcaaatatttaacaattgtttccggccttgctcaaggagctgatgcaatggcacatcaaatagctttaaaatacaatctccctacaattgcagttttagcctttggccatcaaacacattatcccaaaagtacattagcattaagaaataaaatagaagaaaaaggtttagttatatctgaatatccaccacatacaccaatcgctaaatatagatttcctgagcgcaatagaattatcagcggtttgtcaaaaggggttttaattactgaggctaaggaacaaagtggcagtcacatcacgatagattttgcattagagcaaaatagaaatgtttatgttttacctggatctatgtttaatcctatgacaaaaggtaatttattacgtatccaagaaggtgctaaggtagtattaaacgctaatgatatatttgaagactactatatttaaaactaaaaataacgagttgcttcatatttcttttgtttccctttgtaatttattttttaataaaatctataaaaaatagacagggaaaatgatttgtttagatataaaacgttgacaaaagcaaaattaagcgtttatcatttatctttagtaattagattagcgagggggaaatgacattggcagataatttagtcattgttgaatcgcctgcaaaagcaaaaaccattgaaaagtatttaggtaagaaatataaagttatagcttcaatgggacacgtcagagacttaccaagaagtcaaatgggtgtcgacactgaagataattacgaaccaaaatatataacaatacgcggaaaaggtcctgttgtaaaagaattgaaaaaacatgcaaaaaaagcgaaaaacgtctttctcgcaagtgaccccgaccgtgaaggtgaagcaattgcttggcatttatcaaaaattttagagcttgaagattctaaagaaaatcgcgttgttttcaacgaaataactaaagacgctgttaaagaaagttttaaaaatcctagagaaattgaaatgaacttagtcgatgcacaacaagcgcgtcgaatattagatagattagttggctataacatctcgccagttctttggaaaaaagtaaaaaaagggttgtcagcgggtcgagttcaatctgttgcacttcgtttagtcattgaccgtgaaaatgaaattcgaaactttaaaccagaagaatattggactattgaaggagaatttagatacaaaaaatcaaaattcaatgctaaattccttcattataaaaataaaccttttaaactaaaaacgaaaaaagatgttgagaaaattacagctgcattagatggagatcaattcgaaattacaaacgtgactaaaaaagaaaaaacgcgtaatccagcaaacccatttacaacttctacattacaacaagaggcggcacgtaaattaaactttaaagcaagaaaaacaatgatggtcgcacaacaattatatgaaggtatagatttgaaaaaacaaggtacgattggtttaataacatatatgagaaccgattctacacgtatttcagatactgccaaagttgaagcaaaacagtatataactgataaatacggtgaatcttacacttctaaacgtaaagcatcagggaaacaaggtgaccaagatgcccatgaggctattagaccttcaagtactatgcgtacgccagatgatatgaagtcatttttgacgaaagaccaataccgattatacaaattaatttgggaacgatttgttgctagtcaaatggctccagcaatacttgatacagtctcattagacataacacaaggtgacattaaatttagagcgaatggtcaaacaatcaagtttaaaggatttatgacactttatgtagaaactaaagatgatagtgatagcgaaaaggaaaataaactgcctaaattagagcaaggtgataaagtcacagcaactcaaattgaaccagctcaacactatacacaaccacctccaagatatactgaggcgagattagtaaaaacactagaagaattgaaaattgggcgaccatcaacttatgcaccgacaatagatacgattcaaaagcgtaactatgtcaaattagaaagtaagcgttttgttcctactgagttgggagaaatagttcatgaacaagtgaaagaatacttcccagagattattgatgtggaattcacagtgaatatggaaacgttacttgataagattgcagaaggcgacattacatggaggaaagtaatcgacggtttctttagtagctttaaacaagatgttgaacgtgctgaagaagagatggaaaagattgaaatcaaagatgagccagccggtgaagactgtgaaatttgtggttctcctatggttataaaaatgggacgctatggtaagttcatggcttgctcaaacttcccggattgtcgtaatacaaaagcgatagttaagtctattggtgttaaatgtccaaaatgtaatgatggtgacgtcgtagaaagaaaatctaaaaagaatcgtgtcttttatggatgttcgaaatatcctgaatgcgactttatctcttgggataagccgattggaagagattgtccaaaatgtaaccaatatcttgttgaaaataaaaaaggcaagacaacacaagtaatatgttcaaattgcgattataaagaggcagcgcagaaataatatttttatttcctagatacattttaagattgttaaatagaatcattagtgaatcttattttaaagatagtaaaggattaatctaaataagtgcggataatataaacataacaacataattaaaagacataaatgacaataaaaggagtatagaaatgactcaaactgtaaatgtaataggtgctggtcttgccggttcagaagcggcatatcaattagctgaaagaggaattaaagttaatctaatagagatgagacctgttaaacaaacaccagcgcaccatactgataaatttgcggaacttgtatgttccaattcattacgcggaaatgctttaactaatggtgtgggtgttttaaaagaagaaatgagaagattgaattctataattattgaagcggctgataaggcacgagttccagctggtggtgcattagcagttgatagacacgatttttcaggttatattactgaaacacttaaaaatcatgaaaatatcacagttattaatgaagaaattaatgccattccagatggatacacaattatcgcaacaggaccacttactacagaaacccttgcgcaagaaatagtggacattactggtaaagatcaactttatttctatgatgcggctgctccaattattgaaaaagaatctattgatatggataaagtttacttaaagtcccgttatgataaaggtgaagctgcatatttaaactgtcctatgactgaggatgaatttaatcgcttttatgatgcagtattagaagctgaagttgcgcctgtaaattcatttgaaaaagaaaaatatttcgagggttgtatgccttttgaagtaatggcagaacgcggacgcaagacattactatttggaccaatgaaaccagtaggattagaagatccaaagactgggaaacgtccttatgcggtggttcaattaagacaagatgacgctgctggtacactctacaatattgttggcttccaaacgcatttaaaatggggagctcaaaaagaagtcattaaattaattccaggcttagaaaatgttgatattgttagatatggtgtgatgcatagaaataccttcattaattcaccggacgtattaaacgagaaatatgaattgatttcacaaccaaacatacagtttgcgggacaaatgactggtgttgaaggttatgtagaaagcgcagctagcggcttagttgcaggtatcaatcttgcgcataaaatattaggcaagggtgaggtagtatttccgagagaaacaatgattggaagtatggcttactatatttctcatgctaaaaacaataagaatttccaacctatgaatgctaacttcgggttattaccatctttagaaactagaattaaagataaaaaagaacgctatgaagcacaagctaatagagctttggattacttagaaaatttcaaaaaaactttataaaatagttagaaagactagatatgctattcattcttaagtcatcaacgagtaagtaatgactttctaaatggaaaatacttatcctagtctttttaattttggaattgttacgtatttctgacaatttagaattcgcattcaaaaaatatctaaataaataacacgcaataagttgattgatgtaacatgtaagagaatgttttaaataaactttatttaaaaggcaatgaaataataaatggcaaggctattaataaagacttttagtaattaatttaaaaaagaggtattctaattaacaggttttccgattagttacaattatttaattctcaaaagatttagaattgattatcaaattactgtaagccctttgctgtatatgctacaattcttattgatggagggtaaatgtattgaatcatattcaagatgcgtttttaaatacattgaaagttgaacggaatttttcggaacacacattgaaatcatatcaagatgacttaattcagtttaatcaatttttagaacaagaacatttagagttgaatacttttgaatacagagatgctagaaattatttgagctatttatattcaaatcatttgaaaagaacatctgtttctcgtaaaatctcaacgttaagaactttctatgaatattggatgacgcttgatgagaacattattaatccatttgttcaattagtacatccgaaaaaagaaaaatatcttccgcaattcttttacgaagaagaaatggaagcgttattcaaaactgtagaagaggacacttcaaaaaatttacgggatcgagttattcttgaattgttgtatgctacaggcatccgtgtttcggaattagtaaatattaaaaaacaagatatagatttttacgcgaatggtgttaccgtattaggaaaagggagcaaagagcgctttgtaccgtttggtgcttattgtagacaaagcatcgaaaattatttagaacatttcaaaccaattcagtcatgcaatcatgattttcttattgtaaatatgaagggtgaagcaatcactgaacgcggtgtacgatatgttttaaatgatattgttaaacgaacagcaggcgtaagtgagattcatccccacaagctcagacatacatttgcaacgcatttattgaatcaaggtgcagacctaagaacagtacaatcgttattaggtcatgttaatttgtcaacaactggtaaatatacacacgtatctaaccaacaattaagaaaagtgtatctaaatgcacatcctcgagcgaaaaaggagaatgaaacatgagtaatacaacattacatgcaacaacaatttatgctgtaagacataatgggaaagcagctatggctggagatgggcaagtaacgcttggtcaacaagtcatcatgaaacaaacggcaagaaaagtgcgacgtttatatgaaggtaaagtgttagctggtttcgcaggtagtgtagcagatgcgtttacgttatttgaaaaattcgaaacaaaattacaacagtttagtggtaacttagaaagagctgctgttgaattggcacaagaatggcgaggcgataaacaattacgtcaattagaagctatgctaattgtaatggataaagatgctattttagttgtcagtggaactggcgaagttattgctccagatgatgaccttatcgctattggatcaggaggcaactacgcattaagcgcaggacgtgcattgaaacgccatgcatcgcatttgtctgctgaagaaatggcatatgagagcttgaaagtagcggctgatatttgtgtctttaccaacgataatattgttgtcgaaacactataataatcagagcacgataaataattacgagcaattaattttagttaaaagacggaggaatgaaattaatggatacagctggaataagattaactccaaaagaaatcgtatctaaattaaatgaatacatcgttggacaaaatgatgctaaacgtaaagtggcaattgccctacgtaatcgatacagaagaagtttattagatgaggaatcaaagcaagaaatttcacctaaaaatattttgatgattggaccaaccggcgttggtaaaactgaaattgcaagaagaatggccaaagttgtcggcgcgccatttataaaagtagaagctactaaatttactgaggtaggttatgtaggacgagatgttgaaagtatggttagagatcttgttgatgtttcagtaagattagtcaaggcgcagaaaaaatcattggtacaagatgaagcaacagctaaggccaatgaaaaacttgttaagttattagttccaagtatgaaaaagaaagcgtctcaaacgaataatcctttagagtcacttttcggaggtgcaattccaaatttcggacaaaataacgaagatgaagaagaaccacctactgaggaaattaaaacaaaacgttctgaaattaagagacagctagaagaaggcaaacttgaaaaagaaaaggtaagaattaaagtcgaacaagatcctggtgctttaggtatgctaggtacaaatcaaaatcagcaaatgcaagagatgatgaatcaattaatgcctaaaaagaaagttgagcgagaagttgctgttgagacggcaaggaaaatcttagctgatagttatgcggatgaactaattgatcaagaaagcgctaaccaagaagcgcttgaattagcagaacaaatgggtatcatctttatagatgaaatcgacaaagttgcgacgaataatcataatagtggtcaagatgtctcaagacaaggtgttcaaagagatattttacctatacttgaaggtagcgttattcaaaccaaatatggtactgtgaatactgaacatatgctgtttataggtgctggagctttccatgtatctaagccgagtgacttgataccagaattgcaaggtcgttttccgattagagttgaacttgatagtttatcggtagaagattttgtaagaattttgacagaaccaaaattgtcattaattaaacaatatgaagcattgcttcaaacagaagaagttactgtaaactttaccgatgaagcaattactcgcttagctgagattgcttatcaagtaaatcaagatacagacaacattggtgcacgtcgacttcatacaattttagaaaagatgctagaagatttatcattcgaagcaccaagtatgccgaatgcagttgtagatattaccccacaatatgttgatgataaattaaaatcaatttcaacaaataaagatttaagtgcatttattctataaaaatatacaaaaggagaaaaattcatgagcttattatctaaaacgagagagttaaacacgttacttcaaaaacacaaaggtattgcggttgattttaaagatgtagcacaaacgattagtagcgtaactgtaacaaatgtatttattgtatcgcgtcgaggtaaaattttaggatcgagtctaaatgaattattaaaaagtcaaagaattattcaaatgttggaagaaagacatattccaagtgaatatacagaacgattaatggaagttaaacaaacagaatcaaatattgatatcgacaatgtattaacagtattcccacctgaaaacagagaattattcatagatagtcgtacaactatcttcccaattttaggtggaggggaaagattaggtacattagtacttggtcgagtacatgatgattttaatgaaaatgatttggtactaggtgaatatgctgctacagttattggtatggaaatcttacgtgagaagcatagtgaagtagaaaaagaagcgcgcgataaagctgctattacaatggcaattaattcattatcttattctgaaaaagaagcgattgaacatatctttgaagaacttggcggtacggaaggcctattaatcgcatcaaaagttgcagatagagttggtattactagatctgtaattgtaaatgcactacgtaaattagaaagtgctggtgtaattgaatcacgttctttaggaatgaaaggtactttcattaaagttaaaaaagaaaaattcttagatgaattagaaaaaagtaaataagtcgatgagtctgggacataattcaatgtcctagtcgtgacgatgttatcttggcggtagtcaatgaaatgactttgatgattatgttgaagtcatttctttatttttgtctaattttcaatcaaattgatatttcacattaacttgatagaattacctttaaatttatggaaaaatgcttgaaaaacatttgctttagacacggcattatgttatatttattttcggctataaagccaatacacacatatcaaacgtgattgtgtaaagggtgcaatatttatatattgtctttacaatagtttgctatggaggtaattaaccaataggaggaatttataatggcagtaatttcaatgaaacaattactagaagcgggtgttcacttcggtcaccaaacacgtcgtgtggaacccaaaaatgaaaaaatatatcttcactgagagaaatggtatttatatcatcgacttacaaaaaacagtgaaaaaagtagacgaggcatacaacttcttgaaacaagtttcagaagatggtggacaagtcttattcgtaggaactaaaaaacaagcacaagaatcagttaaatctgaagcagaacgtgctggtcaattctacattaaccaaagatggttaggtggattattaactaactataaaacgatctcaaaacgaatcaaacgtatttctgaaattgaaaaaatggaagaagatggtttattcgaagtattacctaaaaaagaagtagtagaacttaaaaaagaatacgaccgtttaatcaaattcttaggcggaattcgtgatatgaaatcaatgcctcaagcattattcgtagttgacccacgtaaagagcgtaatgcaattgctgaagctcgtaaattaaatattcctatcgtaggtatcgttgacactaactgtgatcctgacgaaattgactacgttatcccagcaaacgacgatgctatccgtgcggttaaattattaactgctaaaatggcagatgcaatcttagaaggtcaacaaggcgtttctaatgaagaagtagctgcagaacaaaacatcgatttagatgaaaaagaaaaatcagaagaaacagaagcaactgaagaataatcaactgttgaatctgacttagatatagtttaaatgggtgataagatattaatgcttatcaccttttttaaaaagaaaatcgaggcaaattacaaatattcaattagagtattggcaatcttgcctataataatgctaaaatcataatatataaaatgataacttattggaggaataatgaatggcaactatttcagcaaaacttgttaaagaattacgtgaaaaaactggcgcgggtatgatggattgtaaaaaagcgctaactgaaactgatggtgacatcgataaagcgattgactacctacgtgaaaaaggtattgctaaagcagctaaaaaagcagaccgtattgcggctgaaggtttagtacatgtagaaactaaaggtaacgacgcagttatcgttgaaatcaactctgaaacagactttgttgctcgtaacgaaggtttccaagagttagttaaagaaatcgctaatcaagtattagatacaaaagctgaaactgttgaagctttaatggaaacaactttaccaaatggtaaatcagttgatgaaagaattaaagaagcaatttcaacaatcggtgaaaaattaagtgttcgtcgttttgctatcagaactaaaactgataacgatgctttcggcgcttacttacacatgggtggacgcattggtgtattaacagttgttgaaggttcaactgacgaagaagcagcaagagacgttgctatgcatatcgctgcaatcaaccctaaatatgtttcttctgaacaagttagcgaagaagaaatcaaccacgaaagagaagttttaaaacaacaagcattaaatgaaggtaaaccagaaaacatcgttgaaaaaatggtggaaggacgtttacgtaaatacttacaagaaatttgtgctgtagatcaagacttcgttaaaaaccctgatgtaacagttgaagctttcttaaaaacaaaaggtggaaaacttgttgacttcgtacgctatgaagtaggcgaaggtatggaaaaacgcgaagaaaactttgcggatgaagttaaaggacaaatgaaataatctgtcataaagtaaaacaaggaagaagacacctttaatgttgctttattaaaatgtaaatcattctaataaaacgacaactgtgtcttctttacttgtatatgttacatatattcacgatagagaggataagaaaatggctcaaatttctaaatataaacgtgtagttttgaaactaagtggtgaagcgttagctggagaaaaaggatttggcataaatccagtaattattaaaagtgttgctgagcaagtggctgaagttgctaaaatggactgtgaaatcgcagtaatcgttggtggcggaaacatttggagaggtaaaacaggtagtgacttaggtatggaccgtggaactgctgattacatgggtatgcttgcaactgtaatgaatgccttagcattacaagatagtttagaacaattggattgtgatacacgagtattaacatctattgaaatgaagcaagtggctgaaccttatattcgtcgtcgtgcaattagacacttagaaaagaaacgcgtagttatttttgctgcaggtattggaaacccatacttctctacagatactacagcggcattacgtgctgcagaagttgaagcagatgttattttaatgggcaaaaataatgtagatggtgtatattctgcagatcctaaagtaaacaaagatgcggtaaaatatgaacatttaacgcatattcaaatgcttcaagaaggtttacaagtaatggattcaacagcatcctcattctgtatggataataacattccgttaactgttttctctattatggaagaaggaaatattaaacgtgctgttatgggtgaaaagataggtacgttaattacaaaataaatttagaggtgtaaaataatgagtgacattattaatgaaactaaatcaagaatgcaaaaatcaatcgaaagcttatcacgtgaattagctaacatcagtgcaggaagagctaattcaaatttattaaacggcgtaacagttgattactatggtgcaccaacacctgtacaacaattagcaagcatcaatgttccagaagcacgtttacttgttatttctccatacgacaaaacttctgtagctgacatcgaaaaagcgataatagcagctaacttaggtgttaacccaacaagtgatggtgaagtgatacgtattgctgtacctgccttaacagaagaacgtagaaaagagcgcgttaaagatgttaagaaaattggtgaagaagctaaagtatctgttcgaaatattcgtcgtgatatgaatgatcagttgaaaaaagatgaaaaaaatggcgacattactgaagatgagttgagaagtggcactgaagatgttcagaaagcaacagacaattcaataaaagaaattgatcaaatgattgctgataaagaaaaagatattatgtcagtataaaactaatatacaatgacatattaaaatgccagtattaaacgataatgtaacatttaaaatgggcatgtttaattaaatcaaagatgcatgtgataatttaaattcacaatgagcataaaaatggtgtttaaacaagttaattaaacatatactttataaataataggcattaggtatattgctataataaagttatgtaatttttaacctcagtatgtatgtcacatttctggtgtaaactgtaccgagtcagactttggtacagtttttttatttgcttattcaatgcattaaatgagtatgataaaatgataatgattgtttagtaacttatactatatgacagagatgatcaggctcggaggaaagaccatgtttaaaaagctaataaataaaaagaacactataaataattataatgaagaattagactcgtctaatatacctgaacatatcgctattattatggatggtaatgggcgatgggctaagaagcgaaaaatgcctagaattaaaggtcattacgaaggtatgcaaacaataaaaaaaattactagggtagctagtgatattggtgttaagtacttaactttatacgccttttccactgaaaattggtcaagacctgaaagtgaagtaaattatattatgaatttgcctgtcaatttcttaaagacattcttaccggaactaattgaaaaaaatgtcaaagttgaaacaattggatttactgataagttgccaaaatcaacgatagaagcaattaataatgctaaagaaaagacagctaataataccggcttaaaattaatatttgcaattaattatggtggcagagcagaacttgttcatagtattaaaaatatgtttgacgagcttcatcaacaaggtttaaatagtgatatcatagatgaaacatatataaacaatcatttaatgacaaaagactatcctgatccagagttgttaattcgtacttcaggagaacaaagaataagtaatttcttgatttggcaagtttcgtatagtgaatttatctttaatcaaaaattatggcctgactttgacgaagatgaattaattaaatgtataaaaatttatcagtcacgtcaaagacgctttggcggattgagtgaggagtagtatagtatgaaagttagaacgctgacagctattattgccttaatcgtattcttgcctatcttgttaaaaggcggccttgtgttaatgatatttgctaatatattagcattgattgcattaaaagaattgttgaatatgaatatgattaaatttgtttcagttcctggtttaattagtgcagttggtcttatcatcattatgttgccacaacatgcagggccatgggtacaagtaattcaattaaaaagtttaattgcaatgagctttattgtattaagttatactgtcttatctaaaaacagatttagttttatggatgctgcattttgcttaatgtctgtggcttatgtaggcattggttttatgttcttttatgaaacgagatcagaaggattacattacatattatatgcctttttaattgtttggcttacagatacaggggcttacttgtttggtaaaatgatgggtaaacataagctttggccagtaataagtccgaataaaacaatcgaaggattcataggtggcttgttctgtagtttgatagtaccacttgcaatgttatattttgtagatttcaatatgaatgtatggatattacttggagtgacattgattttaagtttatttggtcaattaggtgatttagtggaatcaggatttaagcgtcatttcggcgttaaagactcaggtcgaatactacctggacacggtggtattttagaccgatttgacagctttatgtttgtgttaccattattaaatattttattaatacaatcttaatgctgagaacaaatcaataaacgtaaagaggagttgctgagataatttaatgaatctcagaactccttttgaaaattatacgcaatattaactttgaaaattatacgcaatattaactttgaaaattagacgttatattttgtgatttgtcagtatcatattataatgacttatgttacgtatacagcaatcatttttaaaataaaagaaatttataaacaatcgaggtgtagcgagtgagctatttagttacaataattgcatttattattgtttttggtgtactagtaactgttcatgaatatggccatatgttttttgcgaaaagagcaggcattatgtgtccagaatttgcgatcggtatggggccaaaaatttttagttttagaaaaaatgaaacactttacactattaggttattgcctgttggtggatatgttcgtatggcaggagatggcttagaagagccaccagtcgagcccggtatgaacgttaaaattaaacttaatgaagaaaatgaaataacacatatcatattagatgatcatcataagtttcaacaaattgaagcgatcgaagttaaaaaatgtgattttaaggatgacttattcatagaaggtatcactgcttatgataatgaaagacatcattttaaaattgctagaaagtctttctttgttgaaaatggtagcttagttcaaattgctccgagagacagacaatttgcacataaaaagccatggccgaaatttttaacattatttgcgggaccgttatttaactttatattagctttagtcctatttattggtcttgcatattatcaaggcacgcctacgtctactgtagaacaagtcgcagataagtatccagctcaacaagcaggattacaaaaaggtgataagatcgtccaaattggcaaatataaaatatctgaatttgatgatgttgataaggcgttagataaagttaaagataataagacgactgttaaatttgaacgtgatggtaaaacaaagtcagttgaattaacacctaaaaagactgaaaaaaaactgactaaagtaagttcagagacgaagtatgttctcggattccaaccagcgagtgaacatacactttttaaaccaattgtattcggatttaaaagctttttaatcggtagtacttatatttttacagctgtagtaggtatgttggctagtatatttacgggcggattctcatttgatatgttaaatggtccggttggtatttatcataacgtcgactcagttgttaaagcgggtatcattagcttaattggttacactgcgttattaagtgtaaacttaggtattatgaatttaattcctattcctgcactagacggtggtcgtattttatttgttatatatgaagcgattttcagaaaaccagttaataaaaaagcggaaacaacgattattgctattggtgccattttcatggtcgttataatgatattagtaacgtggaatgatattcgacgatatttcttataatttaggaggataaataattatgaagcaatccaaagtttttataccaacgatgcgtgacgtgccatcagaagcagaagcacaaagtcatcgtttattattgaaatcgggtttgataaaacaaagtacaagtgggatttatagttatttaccgctagcaacacgtgtgttaaataatattactgcaattgtgcgacaagaaatggaacgtatcgattctgttgaaattttaatgccagcgttacaacaagctgaattatgggaagaatcaggacgttggggtgcatatggcccagaattaatgcgtttacaagatagacatggaagacaatttgcattaggtccaacacatgaagaattagttacatcaatagtaagaaatgaattgaaatcatacaaacaattaccgatgacattattccaaattcaatctaaattccgtgatgaaaagagaccacgttttggtttacttcgtgggcgtgaatttattatgaaagatgcatattcattccatgctgacgaggcatcattagatcaaacgtatcaagatatgtatcaagcgtatagccgtatttttgagagagttggcattaacgcaagaccagtagttgcagattcaggtgctataggcggtagccatacacatgaatttatggcattaagtgctatcggtgaggatacaatcgtttacagtaaagaaagtgattatgctgctaacatcgaaaaagcagaagtcgtttacgaaccaaatcataagcatactactgtgcaacctttagaaaaaattgaaacaccaaatgttaagactgcgcaagaattggcagacttcttaggtagaccagtagatgaaatcgttaaaacgatgattttcaaagttgatggcgaatatattatggttttagtgcgtggccatcatgaaattaatgacattaaattaaaatcttatttcggcacagataatattgaattagcaacacaagacgaaattgttaatttagttggtgcaaatcctggttcactaggtcctgtaattgataaagaaatcaaaatttatgcagataattttgtgcaagatttaaataatttagttgtcggtgctaacgaagatggttatcacttaattaatgtaaatgtaggtagagacttcaacgttgatgaatatggcgatttccgttttattttagaaggcgaaaagttaagtgatggttcaggcgttgcacattttgctgaaggtattgaagttggtcaagtattcaaattgggtactaagtattcagaatcaatgaatgctacattcttagataaccaaggaaaagctcaatctttaattatgggttgttacggaattggaatttctagaacgctaagtgcgattgttgaacaaaatcacgatgataatggaattgtttggcctaaatcagttactccgtttgatttacatttaatttctattaatcctaagaaagatgatcaacgagaactagcagatgcactatatgctgaatttaatactaaatttgatgtgttgtacgatgatcgtcaggaacgtgcaggtgttaaatttaatgatgccgatttaattggtttaccactgcgaattgttgttggtaaacgtgcatcggaaggtattgtagaagttaaagaacgtttaacaggtgatagcgaagaagttcacattgatgacttaatgactgtcattacaaataaatatgataacttaaaataattaagatcgaatgaattataagagtaggaaaaagctgaaagaaatctgatgcttatgtcctgctcttattatttttgatataatgattattcgatgaaaaatgactgaagacatagtataattaaagataaatttgttttaacaatataatgattagccaaatataaagcatttaattttctatcattactatgctcacataatctaaatattgttcgaacacgtaaaagtaatttctatttaaggtggtaattgtcttggcaatgacagagcaacaaaaatttaaagtgcttgctgatcaaattaaaatttcaaatcaattagatgctgaaattttaaattcaggtgaactgacacgtatagatgtttctaacaaaaacagaacatgggaatttcatattacattaccacaattcttagctcatgaagattatttattatttataaatgcaatagagcaagagtttaaagatatcgccaacgttacatgtcgttttacggtaacaaatggcacgaatcaagatgaacatgcaattaaatactttgggcactgtattgaccaaacagctttatctccaaaagttaaaggtcaattgaaacagaaaaagcttattatgtctggaaaagtattaaaagtaatggtatcaaatgacattgaacgtaatcattttgataaggcatgtaatggaagtcttatcaaagcgtttagaaattgtggttttgatatcgataaaatcatattcgaaacaaatgataatgatcaagaacaaaacttagcttctttagaagcacatattcaagaagaagacgaacaaagtgcacgattggcaacagagaaacttgaaaaaatgaaagctgaaaaagcgaaacaacaagataacaacgaaagtgctgtcgataagtgtcaaattggtaagccgattcaaattgaaaatattaaaccaattgaatctattattgaggaagagtttaaagttgcaatagagggtgtcatttttgatataaacttaaaagaacttaaaagtggtcgccatatcgtagaaattaaagtgactgactatacggactctttagttttaaaaatgtttactcgtaaaaacaaagatgatttagaacattttaaagcgctaagtgttggtaaatgggttagggctcaaggtcgtattgaagaagatacatttattagagatttagttatgatgatgtctgatattgaagagattaaaaaagcgacaaaaaaagataaggctgaagaaaagcgtgtagaattccacttgcatactgcaatgagccaaatggatggtatacccaatattggtgcgtatgttaaacaggcagcagactggggacatccagccattgcggttacagaccataatgttgtgcaagcatttccagatgctcacgcagcagcggaaaaacatggcattaaaatgatatacggtatggaaggtatgttagttgatgatggtgttccgattgcatacaaaccacaagatgtcgtattaaaagatgctacttatgttgtgttcgacgttgagacaactggtttatcaaatcagtatgataaaatcatcgagcttgcagctgtgaaagttcataacggtgaaatcatcgataagtttgaaaggtttagtaatccgcatgaacgattatcggaaacgattatcaatttgacgcatattactgatgatatgttagtagatgcccctgagattgaagaagtacttacagagtttaaagaatgggttggcgatgcgatattcgtagcgcataatgcttcgtttgatatgggcttcatcgatacgggatatgaacgtcttgggtttggaccatcaacgaatggtgttatcgatactttagaattatctcgtacgattaatactgaatatggtaaacatggtttgaatttcttggctaaaaaatatggcgtagaattaacgcaacatcaccgtgccatttatgatacagaagcaacagcttacattttcataaaaatggttcaacaaatgaaagaattaggcgtattaaatcataacgaaatcaacaaaaaactcagtaatgaagatgcatataaacgtgcaagacctagtcatgtcacattaattgtacaaaaccaacaaggtcttaaaaatctatttaaaattgtaagtgcatcattggtgaagtatttctaccgtacacctcgaattccacgttcattgttagatgaatatcgtgagggattattggtaggtacagcgtgtgatgaaggtgaattatttacggcagttatgcagaaggaccagagtcaagttgaaaaaattgccaaatattatgattttattgaaattcaaccaccggcactttatcaagatttaattgatagagagcttattagagatactgaaacattacatgaaatttatcaacgtttaatacatgcaggtgacacagcgggtatacctgttattgcgacaggaaatgcacactatttgtttgaacatgatggtatcgcacgtaaaattttaatagcatcacaacccggcaatccacttaatcgctcaactttaccggaagcacattttagaactacagatgaaatgttaaacgagtttcattttttaggtgaagaaaaagcgcatgaaattgttgtgaaaaatacaaacgaattagcagatcgaattgaacgtgttgttcctattaaagatgaattatacacaccgcgtatggaaggtgctaacgaagaaattagagaactaagttatgcaaatgcgcgtaaactgtatggtgaagacctgcctcaaatcgtaattgatcgattagaaaaagaattaaaaagtattatcggtaatggatttgcggtaatttacttaatttcgcaacgtttagttaaaaaatcattagatgatggatacttagttggttcccgtggttcagtaggttctagttttgtagcgacaatgactgagattactgaagtaaacccgttaccgccacactatatttgtccgaactgtaaaacgagtgaatttttcaatgatggttcagtaggatcaggatttgatttacctgataagacgtgtgaaacttgtggagcgccacttattaaagaaggacaagatattccgtttgaaacatttttaggatttaagggagataaagttcctgatatcgacttaaactttagtggtgaatatcaaccgaatgcccataactacacaaaagtattatttggtgaggataaagtattccgtgcaggtacaattggtactgttgctgaaaagactgcttttggttatgttaaaggttatttgaatgatcaaggtatccacaaaagaggtgctgaaatagatcgactcgttaaaggatgtacaggtgttaaacgtacaactggacagcatccagggggtattattgtagtacctgattacatggatatttatgattttacgccgatacaatatcctgccgatgatcaaaattcagcatggatgacgacacattttgatttccattctattcatgataatgtattaaaacttgatatacttggacacgatgatccaacaatgattcgtatgcttcaagatttatcaggaattgatccaaaaacaatacctgtagatgataaagaagttatgcagatatttagtacacctgaaagtttgggtgttactgaagatgaaattttatgtaaaacaggtacatttggggtaccagaattcggtacaggattcgtgcgtcaaatgttagaagatacaaagccaacaacattttctgaattagttcaaatctcaggattatctcatggtacagatgtgtggttaggcaatgctcaagaattaattaaaaccggtatatgtgatttatcaagtgtaattggttgtcgtgatgatatcatggtttatttaatgtatgctggtttagaaccatcaatggcttttaaaataatggagtcagtacgtaaaggtaaaggtttaactgaagaaatgattgaaacgatgaaagaaaatgaagtgccagattggtatttagattcatgtcttaaaattaagtacatgttccctaaagcccatgcagcagcatacgttttaatggcagtacgtatcgcatatttcaaagtacatcatccactttattactatgcatcttactttacaattcgtgcgtcagactttgatttaatcacgatgattaaagataaaacaagcattcgaaatactgtaaaagacatgtattctcgctatatggatctaggtaaaaaagaaaaagacgtattaacagtcttggaaattatgaatgaaatggcgcatcgaggttatcgaatgcaaccgattagtttagaaaagagtcaggcgttcgaatttatcattgaaggcgatacacttattccgccgttcatatcagtgcctgggcttggcgaaaacgttgcgaaacgaattgttgaagctcgtgacgatggcccatttttatcaaaagaagatttaaacaaaaaagctggattatctcagaaaattattgagtatttagatgagttaggctcattaccgaatttaccagataaagctcaactttcgatatttgatatgtaaaatgaaataatcaaggtatttatttaatgcgtatggcgtagtcaaagaaatacaaaattgttgctggacacaaaattatgcccgtatttcttttcaatgtcttacgagtctattcaaatgtaatggtgaaataaaggaacaaacttttacaagaatctctgattaatagtgaagtcatttgtttcaagcataaacttatgctataattaagttgcttaaaaattagtgaactcaggcagaagagtgggagattcccgctcttttctatttgccaaaaagggaggcctgtatgagtaaaattacagaacaagtagaagtgattgttaaaccaattatggaagacttgaattttgaacttgtagacgttgaatatgtcaaagagggtagagatcattttcttagaatctctattgataaagaaggtggcgtagatttaaatgattgtacgctagcttctgaaaaaataagtgaagctatggatgcaaatgatcctattcctgaaatgtattatttagacgtagcgtcacctggtgcagaacgtccaattaaaaaagaacaagatttccaaaatgcaataactaaacctgtatttgtttctttatatgtaccaattgaaggtgaaaaggaatggttaggcattttacaagaagtcaataatgaaacaattgtagtacaagttaaaatcaaagcaagaacgaaagatatagagataccgagagacaaaatagcaaaagcacgtcacgcagttatgatttaacgtgatgaggaggaaaaaacgtgtcaagtaatgaattattattagctactgagtatttagaaaaagaaaagaagattcctagagcagtattaattgatgctattgaagcagctttaattactgcatacaaaaagaattatgatagtgcaagaaatgtccgtgtggaattaaatatggatcaaggtactttcaaagttatcgctcgtaaagatgttgttgaagaagtatttgacgacagagatgaagtggatttaagtacagcgcttgttaaaaaccctgcatatgaaattggtgatatatacgaagaagatgtaacacctaaagattttggtcgtgtaggtgctcaagcagcgaaacaagcagtaatgcaacgtcttcgtgatgctgaacgtgaaattttatttgaagaatttatagacaaagaagaagacatacttactggaattattgaccgtgttgaccatcgttatgtatatgtgaatttaggtcgtatcgaagctgttttatctgaagcagaaagaagtcctaacgaaaaatatattcctaacgaacgtatcaaagtatatgttaacaaagtggaacaaacgacaaaaggtcctcaaatctatgtttctcgtagccatccaggtttattaaaacgtttatttgaacaagaagttccagaaatttacgatggtactgtaattgttaaatcagtagcacgtgaagctggcgatcgctctaaaattagtgtcttctctgaaaacaatgatatagatgctgttggtgcatgtgttggtgctaaaggcgcacgtgttgaagctgttgttgaagagctaggtggtgaaaaaatcgacatcgttcaatggaatgaagatccaaaagtatttgtaaaaaatgctttaagcccttctcaagttttagaagttattgttgatgaaacaaatcaatctacagtagttgttgttcctgattatcaattgtcattagcgattggtaaaagaggacaaaacgcacgtctagctgctaaattaaccggctggaaaattgatattaaatcagaaacagatgcgcgtgaagcgggtatctatccagtagttgaagctgaaaaagtaactgaagaagatgttgctttagaagatgctgacacaacagaatcaaccgaagaggtaaatgatgtttcagttgaaacaaatgtagagaaagaatctgaataataggttggagtgaagtatctatgaaaaagaaaaaaattccgatgcgaaaatgtattctttcaaatgaaatgcatcccaaaaaagatatgattcgtgttgttgttaataaagaaggcgaaatctttgcggatgttactggaaagaaacaaggccgtggcgcatatgtttctaaagatgttgctatggttgaaaaagcacaacaaaaagaaattttagaaaaatattttaaagcatctaaagagcaattggatcctgtttacaaagaaattattagattaatttatagagaagagatcccaaaatgagtatagatcaaatattaaactttttaggattagcaatgagagctggtaaagtaaaaacaggtgaatcagtcattgttaatgagattaaaaaaggaaatttgaagctcgttattgttgcaaatgatgcgtctgataatacagctaaattaattacagataaatgtaagagttacaaagttccattcagaaagtttggaaatcgaaatgaattgggaatagcacttggaaaaggtgagcgtgttaatgtagggattactgacccaggctttgctaaaaagttgctatcaatgatagatgaatatcataaggagtgattatatgagtaaacaaagaatttacgaatatgcgaaagaattaaatctaaagagtaaagagattatagatgagttaaaaagcatgaatattgaggtttcaaatcatatgcaagctttggaagatgaccaaattaaagcattagataaaaagttcaaaaaagaacaaaagaacgacaataaacaaagcactcaaaataatcaccaaaaatcaaacaatcaaaaccaaaataaagggcaacaaaaagataacaaaaagaatcaacaacaaaataataaaggcaacaaaggcaataaaaagaataatagaaataataagaaaaataacaagaataataaaccacaaaatcaaccagctgctccaaaagaaataccatcaaaagtgacatatcaagaaggtattacagtaggcgaatttgcggataaattaaatgttgaatcatcagaaattatcaaaaaattattcttacttggtattgttgctaatatcaatcaatcattaaatcaagaaacaatcgaattaattgccgatgattatggcgttgaggttgaagaagaagttgtgattaatgaagaagacttatcaatctatttcgaagacgaaaaagatgatccagaggcaattgagagaccagcagttgtaacaattatgggacatgttgaccatggtaaaacgactttattagattcaattcgtcatacaaaagttacagcaggtgaagcaggcggaatcactcaacatattggtgcatatcaaattgaaaacgatggcaaaaaaatcactttcttagatacaccgggacatgctgcatttacaacgatgcgtgcgcgtggtgcacaagtaacagatattactattttagtagtagcagctgacgatggtgttatgccacaaacaattgaagcaattaaccatgctaaagaagcagaagtaccaattattgttgcagtaaataaaattgataaaccaacttcaaatcctgatcgagttatgcaagaattaactgaatatggtttaattcctgaagattggggcggcgaaacaattttcgttccactttctgcattaagtggtgatggtatcgacgatttattagaaatgataggattagttgcagaagttcaagaacttaaagcaaatcctaaaaaccgtgctgttggtacagttatcgaagctgaattagataaatcacgtggtccttctgcatcattattagtacaaaacggtacattaaatgttggtgatgcgattgtagttggtaatacttacggccgtatccgtgcaatggttaatgacttaggtcaaagaatcaaaacggctggtccatcaacgcctgttgaaattacaggtattaatgatgtgccacaagctggggatcgctttgttgtatttagtgatgaaaaacaagctcgtcgtattggtgaatcaagacacgaagctagcattatacaacaacgtcaagaaagtaaaaatgtttcattagataacctgtttgaacaaatgaaacaaggtgaaatgaaagatttaaacgttattattaaaggtgatgttcaaggttctgttgaagctttagctgcatcattaatgaaaattgatgttgaaggcgtaaatgttcgtatcattcatacagcggttggtgcaattaatgagtcagacgtgacacttgctaatgcctcaaatggtattatcattggtttcaatgttcgtccagacagtggtgcaaaacgtgctgcagaagctgaaaatgttgatatgcgtttacacagagttatttataatgttatcgaagaaattgaatcagcgatgaaaggtttacttgatccagaatttgaagaacaagttatcggacaagctgaagttcgtcaaacattcaaagtttctaaagttggtactattgctggatgttatgttactgaaggtaaaattacgcgaaatgctggtgtacgtattattcgtgatggtattgttcaatatgaaggcgaattagatacacttaaacgtttcaaagatgatgctaaggaagttgcaaaaggttatgaatgtggtattacaattgaaaactacaatgaccttaaagaaggcgatgttatcgaagcatttgaaatggttgaaattaagcgttaattaaataaattacaagctaaaagtatagttaagattgatatgctccctataaatattgcactttttaagtgtctactttatagggagcatatttgatactagcttttggttttttattagaatagattacctattaaaagttacgttatatggacatgattttgtataaaattttgtggtggcctagaatgatttttaatgacaaaatataatgtcgactattattggaaaattttctgttgaaatgcctatcttacggcaaactttatttgattttataggcttaatttattaaaataacgtgtgagctaaaataattgtttaagcattgttacactaaaaaatgcaaataacaattgaacttaaagataaagaggtgacaagaatgagcagtatgagagcagagcgtgttggtgaacaaatgaagaaggaattaatggatatcatcaacaataaagtcaaagatcctcgagttggttttattacaattacagatgttgttttaacaaatgatttatcgcaggctaaagtatttttaactgtattaggtaacgataaagaagtagaaaatacatttaaagcacttgataaagcaaaaggcttcattaagtctgaattaggttctagaatgcgattacgtattatgccggaattaatgtatgaatatgatcaatcaatcgaatatggtaataaaattgaacgaatgattcaagatttacacaaacaagatagataatttagtgttaggtatctggaaaatgtttgataatttcttaatatcggtatattaacattaaacagttaatacatagatgtgtagaaatagttaacattttccagtttttttatgaataaatttagttgatacgctattaaaatatattttaaaaaagaaggtgactatatgtataatgggatattaccagtatataaagagcgcggtttaacaagtcatgacgttgtattcaaattgcgtaaaatattaaaaactaaaaaaataggtcacacgggtacgcttgatcccgaagttgcaggcgtgttaccggtatgtataggtaatgcaacgagagttagtgattatgttatggatatgggcaaagcttatgaagcaactgtatcgataggaagaagtacaacgactgaagatcaaacgggtgatacattggaaacaaaaggtgtacactcagcagattttaataaggacgatattgaccgattgttagaaagttttaaaggtatcattgaacaaattccgccgatgtactcatccgtcaaagtaaatggtaaaaaattatatgaatatgcgcgtaataatgaaacagttgaaagaccaaagcgtaaagttaatattaaagacattgggcgtatatctgaattagattttaaagaaaatgagtgtcattttaaaatacgcgtcatctgtggtaaaggtacatatattagaacgctagcaactgatattggtgtgaaattaggctttccggcacatatgtcgaaattaacacgaatcgagtctggtggatttgtgttgaaagatagccttacattagaacaaataaaagaacttcatgagcaggattcattgcaaaataaattgtttcctttagaatatggattaaagggtttgccaagcattaaaattaaagattcgcacataaaaaaacgtattttaaatgggcagaaatttaataaaaatgaatttgataacaaaattaaagaccaaattgtatttattgatgatgattcagaaaaagtattagcaatttatatggtacaccctacaaaagaatcagaaattaaacctaaaaaagtctttaattaaaggagatagaatttatgaaagtcatagaagtgacacatcctatacaatctaaacagtatattacagaggatgttgcaatggcattcggatttttcgatggcatgcataaaggtcatgacaaagtctttgatatattaaacgaaatagctgaggcacgcagtttaaaaaaagcggtgatgacatttgatccgcatccgtctgtcgtgttgaatcctaaaagaaaacgaacaacgtatttaacgccactttcagataaaatcgaaaaaattagccaacatgatattgattattgtatagtggttaatttttcatctaggtttgctaatgtgagcgtagaagattttgttgaaaattatataattaaaaataatgtaaaagaagtcattgctggttttgattttacttttggtaaatttggaaaaggtaatatgactgtacttcaagaatatgatgcgtttaatacgacaattgtgagtaaacaagaaattgaaaatgaaaaaatttctacaacttctattcgtcaagatttaatcaatggtgagttgcaaaaagcgaatgatgctttaggctatatatattctattaaaggcactgtagtgcaaggtgaaaaaaggggaagaactattggcttcccaacagctaacattcaacctagtgatgattatttgttacctcgtaaaggtgtttatgctgttagtattgaaatcggcactgaaaataaattatatcgaggggtagctaacataggtgtaaagccaacatttcatgatcctaacaaagcagaagttgtcatcgaagtgaatatctttgactttgaggataatatttatggtgaacgagtgaccgtgaattggcatcatttcttacgtcctgagattaaatttgatggtatcgacccattagttaaacaaatgaacgatgataaatcgcgtgctaaatatttattagcagttgattttggtgatgaagtagcttataatatctagagttgcgtatagttatataaacaatctataccacacctttttcttagtaggtcgaatctccaacgcctaactcggattaaggagtattcaaacattttaaggaggaaattgattatggcaatttcacaagaacgtaaaaacgaaatcattaaagaataccgtgtacacgaaactgatactggttcaccagaagtacaaatcgctgtacttactgcagaaatcaacgcagtaaacgaacacttacgtacacacaaaaaagaccaccattcacgtcgtggattattaaaaatggtaggtcgtcgtagacatttattaaactacttacgtagtaaagatattcaacgttaccgtgaattaattaaatcacttggtatccgtcgttaatcttaatataacgtctttgaggttggggcatatttatgttccaaccttaatttatattaaaaaagctttttacaaatattaacatttattatatgttaagctaatattgagtgaataataaggttacaatgagataaagatgatataagtacacctagagtaataatcaagatattaaaaataaagtatgtttttttaaaaaatataacttatatttatactgataagggtgggacgataagtctattttgtaaataatagatggatatcccgctctctttttttccaattcaatattttataactaatattaaaatacgataataaatgatatgatataactattagattcaagagaggagatttataatgtctcaagaaaagaaagtttttaaaactgaatgggcaggaagatctttaacgattgaaacagggcaattagctaaacaagcaaatggcgctgtattggttcgttatggagatacagtcgtgttatcgacggcaactgcatcaaaagaacctcgtgatggagatttcttcccattaacagtgaactatgaagaaaaaatgtacgctgcgggtaaaattcctggtggatttaaaaagagagaaggacgtcctggtgacgatgcaacattaactgcgcgattaattgatagaccaattagacctttattccctaaaggatataagcatgatgttcaaattatgaacatggtattaagtgcagatcctgattgttcaccacaaatggctgcaatgattggttcatctatggcgcttagtgtgtcggatattccattccaagggccaatcgccggtgtaaatgtgggttatattgacggtaaatatatcattaacccaacagtagaagaaaaagaagtttctcgtttagaccttgaagtagctggtcataaagatgcggtaaacatggtagaggcaggcgctagtgagattactgaacaagaaatgttagaggcgattttctttggtcatgaagagattcaacgtttagttgatttccaacaacaaatcgtcgaccacattcaacctgttaaacaagaatttattccagcagagcgtgatgaagcgctagttgaacgtgtaaaatctttaaccgaagaaaaaggacttaaagaaacagttttaacatttgataaacaacaacgagatgaaaatcttgataacttaaaagaagaaatcgtcaatgaatttatcgatgaagaagatccagagaatgaattacttattaaagaagtttatgcaattttaaatgaattagtgaaagaagaagttcgacgtttaattgcagatgaaaaaattagaccagacggccgtaaacctgatgaaatccgtccattagattctgaagttggtattttacctagaacgcatggttcaggtctatttacacgtggtcagactcaagcactttcagttttaacattaggtgctttaggcgattatcaattaattgatggtttaggacctgaagaagaaaaaagattcatgcatcattacaacttcccgaatttttcagtaggtgaaactggtccagtacgtgcgccaggtcgtcgtgaaattggacatggtgcgttaggtgaaagagcattaaaatatattattcctgatactgctgatttcccatatacaattcgtattgtaagtgaggtacttgaatcaaatggttcatcatctcaagcgtcaatttgtggatcaacattagcattaatggatgcgggcgtaccgattaaagcaccagttgctggtattgctatgggccttgttacacgtgaagatagctatacgattttaactgatatccaaggtatggaagatgcattaggtgatatggactttaaagtcgctggtactaaagaaggtattacagcaatccaaatggatattaaaattgacggtttaacgcgtgaaattatcgaagaggctctagaacaagcgagacgtggtcgtttagaaataatgaatcatatgttacaaacaattgatcaaccacgtactgaattaagtgcttacgcgccaaaagttgtaactatgacaattaaaccagataagattagagatgttatcggacctggtggtaaaaaaattaacgaaattattgatgaaacaggtgttaaattagatattgaacaagatggtactatctttattggtgctgttgatcaagctatgataaatcgtgctcgtgaaatcattgaggaaattacacgtgaagcggaagtaggtcaaacttatcaagccactgttaaacgtattgaaaaatacggtgcgtttgtaggcctattcccaggtaaagatgcgttgcttcacatttcacaaatttcaaaaaatagaattgaaaaagtggaagatgtattaaaaatcggtgacacaattgaagttaagattactgaaattgataaacaaggtcgagtaaatgcttcacatagagcattagaagaataatatttaaagtcatatgacgacaatgtatcgtcatgtgatttttttatgccactttttacgaagtgacccgttttgaatttgttgtattgaacattttaaaacgctttattattttgtgtgcaactgttaattatcctgtatgtatagtgattaatagtgtacatcaagtgttttttaacttataatgaatagtgagtttatatatggacgggtaacaaatttaggaggtaagattttgagtttaataaagaaaaagaataaagatattcgcattataccattaggcggtgttggcgaaattgctaaaaatatgtatatcgttgaagtagacgatgaaatgtttatgttagatgctggacttatgtttccagaagacgaaatgctaggtattgatattgttataccagacatttcatacgtacttgaaaataaagataaattgaagggtatattccttacacacggacatgagcacgcgattggtgcagtgagttatgttttagaacaattagatgcaccagtatatggatctaaattgacaatagcgttaattaaagaaaatatgaaagcccgtaatattgataaaaaagttcgctactatacagttaataatgattcaattatgagattcaaaaacgtgaatattagtttctttaatacgacacacagtattcctgatagtttaggtgtttgtattcacacttcatatggtgccattgtgtatacaggtgaatttaagtttgaccaaagtttacatggacattatgcaccagatattaaacgtatggcagagattggtgaagaaggcgtatttgtcttaatcagtgattctactgaggcagagaaacctggatataatactccggaaaatgtgattgaacatcatatgtatgatgcttttgcaaaagtgcgaggtcgcttgatagtttcatgttatgcttcgaactttatacgtattcagcaagttttaaatattgctagcaagctaaatcgtaaagtgtcatttttaggaagatcacttgaaagttcatttaatattgctcgtaaaatggggtatttcgacattcctaaagatttgctaattcctataacagaagttgataattatcctaaaaatgaagtgataattatagctactggtatgcaaggagaacctgtagaagccttaagtcaaatggcgcaacataagcataaaattatgaatatcgaagaaggcgattctgtatttttagcaattacggcttctgctaatatggaagttatcattgcgaatacattaaatgagcttgtacgtgctggcgcacatattattccaaataacaaaaagattcatgcttcaagtcatggttgcatggaagaattaaaaatgatgattaatattatgaaacctgaatactttattcctgtacaaggtgaatttaaaatgcagatagcacatgcgaagctagcagctgaagcaggtgttgcaccagaaaagattttccttgtggaaaaaggagatgtcattaattacaacggtaaagatatgatattaaatgaaaaggtaaattcaggaaatattttaatagatggcattggtattggggatgtaggaaatatcgtgttgagagaccgtcatcttttagcagaagatggtatctttattgctgttgtaacgttagatcctaaaaatagacgtatagctgcgggacctgaaattcaatctcgtgggtttgtatatgtacgtgaaagtgaagacttattacgtgaagcagaagagaaagtacgtgaaatagtagaggctggtttacaagaaaaacgcatagaatggtctgaaattaaacaaaatatgcgtgatcaaattagtaaactattattcgaaagtacaaaacgtcgtcctatgattattccagtaatttctgaaatttaatcaaaaagtcattaacataaaagaggtcagaacaagtcactgaaatataatggttgtcatggacaatttacttatattttatgatagtcaattgaaggggtaacgattaatctgttatcttaagtaaattgatacatagatgatattgttctaacctctttcatcgtctgtttggactacatattctaaacatcaaataggaaattatatataataacgtcgttttaactaaggcaacataaggaggtgcgtcaattggcacaagcaaaaaagaaatcgacagctaagaaaaaaacaacatcaaaaaaaagaacaaattcgaggaaaaagaagaatgataatccgatacgttatgtcatagctattttagtagttgtattaatggtgttgggtgttttccaattaggaataataggtcgtctaattgacagcttctttaattatttatttgggtacagtagatatttaacatatattttagtactcttagcaactggttttattacatactctaaacgtattcctaaaactagacgaacggctggttcgattgtattgcaaattgcattgctatttgtatcacagttagtttttcattttaatagtggtatcaaagctgaaagagaacctgtactttcttatgtgtatcagtcataccaacacagtcatttcccaaattttggtggcggtgtattaggcttttatttattagagttaagcgtacctttaatttcattatttggtgtatgtattattactattttattattatgctcaagtgttattttattaacaaaccatcaacatcgtgaagttgcaaaagttgcactggaaaatataaaagcttggtttggttcatttaatgaaaaaatgtcggaaagaaaccaagaaaaacaattgaagcgtgaagaaaaagcaagacttaaagaagaacaaaaggcacgtcaaaatgaacagccacaaataaaagatgtgagtgattttacggaagtgcctcaagaaagagatattccaatttatgggcatactgaaaatgaaagtaaaagccagagtcaaccaagtcgaaaaaaacgagtgtttgatgcagagaatagttcgaataacatcgtaaatcatcatcaagcagatcagcaagaacaattaacagaacaaactcataacagtgttgaaagtgaaaacactattgaagaagctggtgaagttacgaatgtatcgtatgttgttccaccgttaactttacttaatcaacctgcaaaacaaaaagcaacatctaaagctgaagtgcaacgtaaaggacaagtactagagaatacattaaaagattttggggtaaatgcaaaagtgacacaaattaaaattggtcctgcagtaactcaatatgaaattcaaccagctcaaggggttaaagtgagtaaaattgtaaacttgcataatgatattgcattagctttagcagcaaaagatgttagaatcgaagcgccaatacctggtcgttctgcagtaggtattgaagtgccaaatgagaaaatttcattagtttcactaaaagaagttttagatgaaaaattcccgtctaataataaactagaagttggattaggaagagatatatcaggtgatccaattactgttccactaaatgaaatgccacacttattggtggcaggatcgacgggtagtggtaaatctgtttgtataaatggtattattacaagtattttattaaatgctaagccgcatgaagttaaacttatgttaatcgatccgaaaatggttgaactaaatgtttataacggaattccacacttattaattccggttgttacaaatcctcataaagctgctcaagctttagaaaaaattgtagctgagatggaaagacgttatgatttattccaacattcatcaactagaaacattaaaggttataacgaattaatccgtaagcaaaatcaagaattagatgagaagcaaccagaattaccttatatcgttgttattgtagatgagcttgcagatttaatgatggtagctggtaaagaagttgaaaatgcgattcaacgtattacacaaatggcacgtgcagcaggtatacatttaattgtagcgacacaaagaccttctgtggatgtaattacaggtatcattaaaaataatattccatctagaatagcttttgctgtgagttctcaaacagattcaagaactattattggtactggcggcgcagaaaagttacttggtaaaggtgacatgttatacgttggaaatggtgactcatcacaaacacgtattcaaggggcgtttttaagtgaccaagaggtgcaagatgttgtaaattatgtagtagaacaacaacaggcaaattatgtaaaagaaatggaaccagatgcaccagtggataaatcggaaatgaaaagtgaagatgctttatatgatgaagcgtatttgtttgttgttgaacaacaaaaggcaagtacatcattgttacaacgccaatttagaattggttataatagagcatctaggttgatggatgatttagaacgcaatcaggtaatcggtccacaaaaaggaagcaagcctagacaagttttaatagatcttaataatgacgaggtgtaaaaaaatgtcagaaatgaatgcggtatataacgttaaacaatacattttaaatttgattaagcaaaataaattggaatatggtgaccaacttccaagtaatttatcaattgccagagaattaaatgtaaaaaccgacgatgtttatgaagcaattcaggcattgattactgaacaagtcattaaagataattttgaagagggcacaagtgttaagtcactgccccctttcttttatccattgaatgaacttataagtattgggcaaatgattaaaaatgcaggatttgaatgcggaactgaatacttaaattttgatgagcaaccagcaactatgttagatgcaaatttgttgagcgttgaagaaggatatccagtaaccattatagaacgattacgaactgccgatggagaaccggtcgtctattgtttagataaaattgctaaaaaagaattaacatgtacagagtatcaaatgagcaatggatcgattctaagtgcgataaaagaacaaagtaatcataatatttgttatgctgatacagaaattgaagcggtaaattatgaacctcgaatatccgaagtactgaatgcttcgccacacgaaggtttgattttattaaaaattacgcactataatgaatcagatgaacctattttgtattcattaaattatatgaaaaatagcttagttcaatttaaaatcactagaaaaatatagatgtaagaagatatagaggaggctatatatttgagtagacaatctcaaccaaatatacatatcaaagtttcaccaacaactaaatttaaaacaactactatagtttttaaatttatggcacctttagaatatgacacaataacagctagatcattattaagcaaattattagttcgagcaactaagaaatggccaaccgataagtcgtttaataatcacttagccgatttatatggtgcgtatgtgaatagtacaatttcaaaattcaaagatcagcatgtcattacattttcattagaaattgttaatgaacgttatttaagaaacggtgaatcattatttaatcaaggattagatttattacaagaaatcatttggaatccattaattgaaaataaagcattcaatgataattttgttaaccaagagaaaacattattagccaaaaaaatagaagcaatggtagataataaagcacaatattcgtttttaaaattactcgaccatatgtttgaaaatgaagcatataaatacttatctacaggacaactagaacaaatcccacatattactgctgaaacactatatcatacatatcaatcaatgattaataatgatcaatgttctgtttatgttgtcggcaatgtagaacctgaaagtgttgagaaacaaatacgtgaaaaatttgcacttaaaccattcgataaacatcaattccaacattctactcatcatttacacgatgaagaagttgattatattgttgaatatgatgacgtggatcaagctaaattaaatatgggataccgttttccaacacaatatggacaaagtggatatgctgcctttgttgtatttaacatgatgtttggaggagatccttcatctgttttatttaatgaagtgcgagaaaagcaaagtttagcgtactctatacattcacaaattgatggcaaaaatggctatttatttgttttgagtggggtttcaagtgataagtacgaaactgcaaaagacactattataagtgaatttgaaaaaataaaagcaggagatttcactgaagaaaaattagagttagctaaaaaagtaatcatttctcatcgatatgaatctgaagatcgtccgaaaagtattatagagattatgcataaccaaatattattagagcaaccacaaagcaaagaaacatttataaatgatatacagaaggtaagtcgcgaagatattgtttctgttgctgaaaaagcatttttagatacaatctatgtgttgacaaaaggaggggataaataatgaaagagcgttattatgaattaatagacgaaagagtattcgaacaagaattagaaaatggtttacgattatttattatccccaaaccaggttttcaaaagacatttgtcacttacactacacaatttggttcattagataatcaattcaaaccccttggacaagaccaatttgttactgtacctgatggagttgctcactttttagaacataaattatttgaaaaagaagaagaagacttatttactgcgtttgctgaagataacgcacaagcaaatgcgtttacaagctttgatcgtacaagctacttgttcagtgcaactgataatattgaaaacaacattaaacgtttacttacaatggttgaaacgccttattttacaaaagaaactgttgataaagaaaaaggtattattgcagaagaaataaaaatgtatcaagagcaacctggatataaattaatgtttaatacattgcgtgcaatgtatcaacaacatccaatacgtgttgatattgccggtagtgtagaaagtatatacgatattacaaaagatgatttgtatctatgttatgaaacgttttatcatccatcaaatatggttttatttgttgttggcgatgtggatcctgaagcaatatgtcgaatagtaaaacaacacgaggatgctcgtaataaagttaaccaacccaaaatcgaacgaggacttgttgatgaaccggaggatgttaaagaagcatttgttactgaatctatgaaaattcaatcaccaagactaatgcttggttttaaaaataaaccattacaagaagcgcctcaaaaatatgtacaacgtgatttagaaatgtcattattctttgagttaatttttggggaagaaacagatttttatcagaatttattaaacgaaggacttatcgatgatacatttggttatcaatttgtactagagccgacgtatagtttttcaatcgtgacaagtgctactgaagaaccagataaattaaaaaaattattattagatgagttgcgtgataaaaaaggcaatttccaagatgcagaagcatttgaacttttgaaaaagcaatttataggtgaattcatatcaagtttaaactcacctgaatatattgctaatcaatatactaaattgtattttgaaggtgttagcgtgtttgacatgttagacattgttgaaaatatcacgttagatagtattaacgaaacgtcatcgttatatttaaatttagatcagcaagtcgatagtcgtttggagattaaaaagtaatgaaagcattagtattaggtggttctggttcaattggttctgagatagtcaaacaattattaactgatggatttgaagtttatgtgcaatattatcgtactgatataaatgaattaactagcaaatttaatgatgataaagttcgttttatacaagcggatttatctcaaacaattgatattgacaaaacatttggtgacattaaatcattagactgtttaatatatgcaagtggtcagtctttatatggtgttttacaagatatgaaagaccatgatattgatgcatgttatcagttaaatgtcttgcaattaattcgattatgtagatatttcgttgatgttttacgtcaaagtgccaatggaagaattattgtaatttcatcaatttggggtgagacaggagctagtatggaaactatttattcggcgatgaaaagtgcacaattaggtttcgttaaggcgcttagtcaagagcttgcactaacatcagtgacagtaaatgctatcgcacctggatttgtagccggtaatatggcaagtgagtggcaagaagatgaacttcaagcaatgataactgaattaccacaacagcgattggttttaccgagtgaggttgctcatacatgcgcctatttatatcacccaaatgctagaagtgttactggaactatacagaaagttaatggtgcttggtatatttaaaatatagaactatttttatgagcaaatgtttttatgattgatgttataatatgaatattacaatgaatcataatttgttaattaaacaaggggtgaggttcaccatgacagttgcagagaaaaaagaatggtacctagaatacgaaattgaaattaatagaccgggtcttttaggtgatgtatctagtttattaggtatgttaggtataagtattgttacaattaatggtgttgatcaaggtaaacgaggccttttaattaaaacagacaatcttgaaaaagttgaacgttttgagcaaatagctcgtggtataaatgaaattgaaataacaaagcttaaaaaaccagaattaagagaccgtcttgcagtaagacatggaagatatattgagcaagatgcaaaagataagaaaacctttcgatttgagcgtgaagatttaggcttgttagtagactttttagctgaattgttcaaagaagaaggtcataagttgattggcattagaggtatgccacgggttggtaaaactgaatcaattgttgcgggaagtgtttgtgcacataagagatggttatttattagttctactttaataaaacaaactgtacgtagctctctaattaaaggggaatatgatgccaatcatgtatacattattgatggtgcagttactgccagagaatctaatccaaaacatcaagagcttgttaacgaagttatgacgttaccatcaatcaaagtcgttgaacatccagatttatttgttgaaacaagtacttgtacaatggaagattttgactatattatcgaattgagagaaaatgaaaatcaagaaatacattacgaagaaatgaagaaacagacagtccaaagtaagaataatttagattttggagatccgtttggtggtggttttggtttcttcgagtaagtgtaaggaggctatgaattgaaaacggtcggtgaagcgctaaaaggtagacgtgaaaggttaggaatgactttaacagaattagagcaacgtactggaattaaacgtgaaatgctagtgcatattgaaaataatgaattcgatcaactaccgaataaaaattacagcgaaggatttattagaaaatatgcaagcgtagtaaatattgaacctaaccaattaattcaagctcatcaagatgaaattccatcgaaccaagccgaatgggacgaagtaattacagttttcaataataataaagacttagattataagagtaaatcaaaagagccaatacaattattagtaatcatgggtattacagttttaataactttattgttatggatcatgttagttttaatattttaacagaaataaattagtgagaaatgaggatgtataatgaatattccgaaccagattacggtttttagagtagtgttaataccagtttttatattgtttgcgttagttgattttggatttggcaatgtgtcatttctaggaggatatgaaataagaattgagttattaatcagtggttttatttttatattggcttcccttagcgattttgttgatggttatttagctagaaaatggaatttagttacaaatatggggaaatttttggatccattagcggataaattattagttgcaagtgctttaattgtacttgtgcaactaggactaacaaattctgtagtagcaatcattattattgccagagaatttgccgtaactggtttacgtttactacaaattgaacaaggattcgtaagtgcagctggtcaattaggtaaaattaaaacagcagttactatggtagcaattacttggttgttattaggtgatccattggcaacattgattggtttgtcattaggacaaattttattatacattggcgttatttttactatcttatctggtattgaatacttttataaaggtagagatgtttttaaacaaaaataaatatttgtttatactagatttcattttcatatggaatctagtttttttaatcccaattttagaaattagccacgcaattgtttataatgatatattgtaaaacaatatttgttcatttttttagggaaaatctgtagtagcatctgatacattgaatctaaaattgatgtgaatttttaaatgaaatacatgaaaaaatgaattaaacgatacaagggggatataaatgtcaattgccattattgctgtaggctcagaactattgctaggtcaaatcgctaataccaacggacaatttctatctaaagtatttaatgaaattggacaaaatgtattagaacataaagttattggagataataaaaaacgtttagaatcaagtgtacgtcatgcgctagaaaaatatgatactgttattttaacaggtggcttaggtcctacgaaagatgacttaacgaagcatacagtggcccagattgttggtaaagatttagttattgatgagccttctttaaaatatattgaaagctattttgaggaacaaggacaagaaatgacacctaataataaacaacaggctttagtaattgaaggttcaactgtattaacaaatcatcatggcatggctccaggaatgatggtgaattttgaaaacaaacaaattattttattaccaggtccaccgaaagaaatgcaaccaatggtgaaaaatgaattgttgtcacattttataaaccataatcgaattatacattctgaactattaagatttgcgggaataggtgaatctaaagtagaaacaatattaatagatcttatcgataaacagactaatcctacgattgcgcctttggcgggaagtcatgaagtatatattagattgactgcaaatgccgactcaaaagaacaagcacaatcattgattcaacctgttaaacaagaaattcttgatcgtattggagaatattattatggttcagatgacacattaattgagcaagctgtaataaagaaaattcatgaaccttttgtaatatatgatggtattactaatggtgctttatatcatcgattgaaagaagtggatttaaacgatgttctaaagggtatgattaatcacaatgaaaactttgttgatattaataaacctattgagcagcaattaaaagatgcagtgcaatttgttaataaattgtttaatgtgtcatcagcaattattctattagagtatgatggtgtagttcatataggctatgataataactttgaatttaaaactgagcaatttaaaatgtctaaatctagaaatttattaaagaacagaagtcaaaattatgcgctcataagattattaaattggcttagaacaacaaattaattgtattatcgataaaaatataagcacgtttgttcgtttttgcgttttgatttcaagattttatacgaacaaatattcgcaaaacacttgtattttattttgaatccttgtatagtattggtaagataattaaaagatagcaatttcaattaggaggtctcgctttggataacgatcgtcaaaaagctttagatacagtaattaaaaatatggagaaatctttcggtaaaggtgccgtaatgaagttgggtgacaatataggtcgccgagtttcaactacatcaactggttcagttacattagataatgcgctaggtgtaggtggctatcctaaaggacgaattattgaaatttatggtcctgaaagttctggtaagacaacagtagcgcttcacgctattgctgaagtacaaagtaatggcggggtggcagcatttatcgatgctgaacatgctttagatccagaatatgctcaagcattaggcgtagatatcgataatttatatttatcgcaaccggatcatggtgaacaaggtcttgaaatcgccgaagcatttgttagaagtggtgcagttgatattgtagttgtagactcagttgctgctttaacacctaaagctgaaattgaaggagaaatgggagacactcacgttggtttacaagctcgtttaatgtcacaagcgttacgtaaactttcaggtgctatttctaaatcaaatacaactgctattttcatcaaccaaattcgtgaaaaagttggtgttatgttcggtaatccagagactacaccaggtggacgtgcattaaaattctatagttcagtaagactagaagtacgtcgtgcagaacagcttaaacaaggacaagaaattgtaggtaatagaactaaaattaaagtcgttaaaaataaagtggcaccaccatttagagtagctgaagttgatattatgtatggacaaggtatttctaaagagggtgaacttattgatttaggtgttgaaaacgacatcgttgataaatcaggagcatggtattcttacaatggcgaacgaatgggtcaaggtaaggaaaatgttaaaatgtacttgaaagaaaatccacaaattaaagaagaaattgatcgtaaattgagagaaaaattaggtatatctgatggtgatgttgaagaaacagaagatgcaccaaagtcattatttgacgaagaatagtacacaaatttatatctatagttaaacttagcaaatatccttataggattgattgaaagtgatattcatctcataaagctagaataatatctaactttatgggatacactacaaatcgagactataaggttttttattttatttattattacattatcaatagttttataatcgagcttcaaaactttagaaaatagtagaaatagcattcaatatagtgcaaaagtgcaaattgataacttgacacttatctcctataaaccgtacaattaatttgtatgatttatatataatttcataaagtcatattgaatttcatataaagagcaaaccctagaaaaggaggtgtttgtgtgaatttattaagcctcctactcattttgctggggatcattctaggagttgttggagggtatgttgttgcccgaaatttgttgcttcaaaagcaatcacaagctagacaaactgccgaagatattgtaaatcaagcacataaagaagctgacaatatcaaaaaagagaaattacttgaggcaaaagaagaaaaccaaatcctaagagaacaaactgaagcagaactacgagaaagacgtagcgaacttcaaagacaagaaacccgacttcttcaaaaagaagaaaacttagagcgcaaatctgatctattagataaaaaagatgagattttagagcaaaaagaatcaaaaattgaagaaaaacaacaacaagtagatgcaaaagagagtagtgttcaaacgttaataatgaagcatgaacaagaattagaacgcatctccggtctcactcaagaagaagctattaatgagcaacttcaaagagtagaggaagaactgtcacaagatattgcagtacttgttaaagaaaaagaaaaagaagctaaagaaaaagttgataaaacagcaaaagaattattagctacagcagtacaaagattagcagcagatcacacaagtgaatcaacggtatcagtagttaacttacctaatgatgagatgaaaggtcgaatcattggacgagaaggacgaaacatccgcacacttgaaactttaactggcattgatttaattattgatgacacaccagaagcggttatattatctggttttgatccaataagaagagaaattgctagaacagcacttgttaacttagtatctgatggacgtattcatccaggtagaattgaagatatggtcgaaaaagctagaaaagaagtagacgatattattagagaagcaggtgaacaagctacatttgaagtgaacgcacataatatgcatcctgacttagtaaaaattgtagggcgtttaaactatcgtacgagttacggtcaaaatgtacttaaacattcaattgaagttgcgcatcttgctagtatgttagctgctgagctaggcgaagatgagacattagcgaaacgagctggacttttacatgatgttggtaaagcaattgatcatgaagtagaaggtagtcatgttgaaatcggtgtagaattagcgaaaaaatatggtgaaaatgaaacagttattaatgcaatccattctcatcatggtgatgttgaacctacatctattatatctatccttgttgctgctgcagatgcattgtctgcggctcgtccaggtgcaagaaaagaaacattagagaattatattcgtcgattagaacgtttagaaacgttatcagaaagttatgatggtgtagaaaaagcatttgcgattcaggcaggtagagaaatccgagtgattgtatctcctgaagaaattgatgatttaaaatcttatcgattggctagagatattaaaaatcagattgaagatgaattacaatatcctggtcatatcaaggtgacagttgttcgagagactagagcagtagaatatgcgaaataatttttgtctccctcacaaattagtgagggagcttttttaagttgtagtcttaatctagttagacagcactttatcggtaataactatattaaacagtagttatttgaaagtaagacggaccttatattaaataagaagttattgcttttaataaaaatgttttaggcttcgtaattactatatttatattatgtaaacctataaagatgattggttttctatccaataaaaaagaagagaagatgtaacacatcttctcttctgcaatattaattaggatttatttctaagttgagttattttaattgtaaatctgttttctttaattcttttataacttctgcagtatcataacaatttgttgcaattgttgaatatctctctgctaaacgatatgcattaatgtaaagctttaaactttctttagctatatcctctgcatcttcgaattttgatgggttagacataaccactaattctgcaaatttttctggatcaatattaatagacatgtatttatttacaactcctatttattttgatgtcttaatactaacatattgaagttttcagacaaagtaatgtctctctataattgaagaaaaataattcaaagaatttaatatttactttaaatattagaacgtatgaattaaactagtatttatgagaggatgaacaaaacatgagaataatgtttataggggatatcgtaggtaaaattggacgagacgcaattgaaacgtacatacctcaactgaagcaaaagtataaaccaacagttacaattgtaaatgctgaaaatgcagcacatggtaaaggtttgactgaaaaaatatataaacaattactaagaaatggtgtagatttcatgactatgggtaatcacacatatggtcaacgtgaaatttatgattttatagatgaagcaaaacgactagtaagaccagcgaattttccggatgaagcgccgggaattggtatgagatttatacaaattaatgatattaaacttgcagttattaatctgcaaggaagagcgtttatgccagatattgatgatccttttaaaaaggcagatcaattagtcaaggaagcacaagaacaaactccgtttatatttgttgattttcatgcagaaacaacttctgaaaagtatgcaatgggatggcatttagatggtagagctagcgctgttgttggaacgcatacacacattcaaacagcagatgaacgtattttaccaaaggggacagggtatataacggatgttggtatgacaggtttttatgatggcattttaggaataaataaaacagaggtaattgagcgttttatcactagtttgccacaaagacatgttgttccaaatgaaggtagaagtgtattatctggtgttgttattgatttagacaaagaaggtaaaacaaagcacatcgaacgtatattgataaatgatgaccatccattttcaacattttaaaattacgtaagtaaacattcgaattggaccctatcgtccattagtatgaatttaatatagtaccactgtttacatagtaaatcggtggttctttttgttatcatttaatatgaaatatatccataggaggcatataactatgaaaccacaattatcgtggaaagttggcggtcaacaaggcgaaggtattgaatcaactggggaaatcttcgctacggctatgaatagaaaaggatattatttatatggatatagacatttttcaagtcgtatcaaaggtggacatacgaataataaaattagagtttctacgacgcctgttcatgcaattagtgatgatttagatattttgattgcatttgaccaagaaacaattgatgttaaccatcatgaaatgagagaagacagtattattttagctgatgccaaggctaaacctgtgaaaccagaaggatgtcatgcacagcttattgaattaccttttacagcaaccgctaaagaattaggtacagcattaatgaaaaacatggttgcaataggtgctactagcgcattgatgaatttgaatacaaatacatttgaagaacttattactaatatgttttctaaaaaaggtgacaaggtagttgaagtcaatatccaagcattaaacgaaggttatcaattaatgcaatctcgcttacctgaaatctacggggactttgaattagagtcaacagatgcactaccacatctatatatgattggtaacgatgccattggattaggtgcaattgctgcaggttcacaatttatggcggcatatcctattacacctgcgtctgaagttatggaatatatgattgccaatatatctaaagtaaacggagcggttattcaaacagaagatgaaattgctgctgtaactatggctattggtgcaaattatggtggagtcagagcgtttacggctagtgctggtccaggtttatctttaatgatggaagcaattggattatctggtatgactgaaacgccattagtcattattaatacccaacgaggtggaccttctactggattacctacgaaacaagaacagtcagatttaatgcaaatgatttatggtacacatggtgatattccaaaaattgttgtagcaccaacagatgcagaagatgcattttatttaactatggaagcatttaatttagcagaacaatatcaatgccctgttatagttctaagtgatttgcaattatctttaggtaaacaaactgttgaaaaattagattataatcgtattgaaattaaacgtggtgaaatcattcaatctgatattgaacgtgaagaagatgataaaggttatttcaagcgttatgcgttaacatccgatggtgtttctcctagacctatccccggtgttaaaggaggtattcatcatataactggtgtggaacacaatgaagaaggtaaacctagtgaatctgcgtcaaatagacaacaacaaatggaaaaacgaatgcgtaaaattgagcagttactaattgaatcgccagtagaagctaacttacaacatgaggatgcagatattctttatatcggttttatttctacaaaaggtgcaattcaagaaggtagtaaccgtttgaatcaacaaggcataaaagttaacactatacaaattagacaattgcatccattcccaacaagcgttattcaagatgcagttaataaagcgaagaaagtcgttgtagtggagcacaattatcaaggacaattggctagtattataaaaatgaatgtcaatattcatgataagattgaaaattatacaaagtatgatgggacacctttcctaccacatgaaatcgaagaaaaaggcaaaataattgctactgaaataaaggagatggtatagatggcgacatttaaagattttagaaataatgttaagcctaactggtgccccggatgtggcgatttctcagtacaagctgcaattcaaaaagcagccgcaaatatagggttagaacctgaagaagtagctatcatcaccggtataggatgttctggccgtctttcaggatatattaattcttatggcgttcattctattcacggacgtgcattacctttagctcaaggtgtaaaaatggcgaataaagatttaactgttattgcatcgggaggagatggtgatggttatgctataggtatggggcatacaatccatgctttaagaagaaatatgaacatgacgtatatagtcatggataatcaaatttatggtttgacaaagggacaaacatcgccgtcatcagcagtaggatttgttactaaaacaacgccaaaaggtaatatagaaaaaaatgttgcgcctttagaattagtattatcatctggtgccacatttgtagcccaaggtttttcaagcgatattaaaggattaacaaaactaattgaagatgcaattaatcatgatggattttcattcgttaatgtcttttcaccatgtgtgacttataataaaattaacacatacgattggtttaaagaacatttaacaagtgttgatgacattgaaaattatgattctacagataaacaattagcgactaaaactgttattgaacatgaatctttagtaactggtattgtttatcaagataaagaaacaccatcatatgaatctcaaattaaagagttagatgatacaccacttgctaaaagagatatcaaaattactgaagacaccttcaatgcattaactgaacaatttatttaataattaaaactgagtcgtataaatgtatttataacagatccatttatgctactcagttttttactattacaaaaaataaaggagtttttaaaaatgaaagacacattaatgagtatacaaataattcctaaaacaccaaacaatgacaatgttataccttacgtagacgaggcgattaaaataattgacgaatctggtttgcattttagagtaggtccgttagaaacgacagtacaaggaaatatgaatgaatgtttaattttaatacaatcattaaatgaacgaatggtggaacttgaatgtccaagtattattagccaagttaagttttatcatgtgccagatggcatcactattgaaactttaactgaaaaatatgatgaataacattaaaagtgaagtaaactggatttgaattggcttgttagagatgacgtataactttaactgtttttgcactttatagttaaatttaatataattattaaatgatacgggcaaatagaaaggattttgtaaagtgaacgaagaacaaagaaaagcaagttctgtagatgttttagctgagagagataagaaagcagaaaaagattatagtaaatattttgaacatgtttatcagccgcctaatttaaaagaagcgaaaaaaagaggtaaacaagaagttcgttataatagagatttccaaattgatgaaaaatatcgcggtatggggaacgagcgtacatttttaattaaaacatatggatgtcaaatgaatgcacatgacactgaggtcattgctggtatacttgaagcattaggctatcaagcaacgactgatattaacactgcagatgttattttaattaatacatgtgcgattagagaaaatgccgagaacaaagtgtttagtgaaataggtaatttgaagcatttgaaaaaagaacgacctgatattttaatcggtgtttgtggttgtatgtcacaagaagagtcagtagtgaataaaattttaaaatcgtatcaaaatgtagatatgatatttggtacacataatattcatcatttaccagaaattttagaagaagcatacttatctaaagcaatggttgttgaagtatggtctaaagaaggagacgttattgaaaatcttccaaaagtccgtgaaggcaacattaaagcatgggtcaatattatgtatggttgtgataagttttgtacatattgtattgttccatttacaagaggtaaagaacgaagccgtagacctgaagacattatagatgaagtacgtgaacttgctcgtgaaggttacaaagaaataacgcttttaggtcaaaatgtaaattcttatggtaaagatttacaggatatagaatatgacttaggagatcttttacaagcaatttctaaaatagcgattccaagagttcgtttcacaacaagtcatccttgggactttacagatcacatgattgatgttatttcagagggtggtaatatcgttccgcatatccacttgccagttcaatctggaaataatgcagtattaaaaataatgggtagaaaatatacacgagaaagttatttggatttagtaaaacgaatcaaagatagaattcctaatgtagcattaactacagatattattgtagggtatccaaatgaatcagaggaacaatttgaagaaactttaactctgtatgatgaagttggttttgaacatgcatatacgtacttgtattcacaacgtgatggtacgcctgctgctaaaatgaaagataatgtacctttaaatgtcaaaaaggaacgattgcaacgtttgaataaaaaagttggtcattattcacaaatagctatgagtaagtacgaaggacaaactgtaacagtactttgtgaaggaagtagtaaaaaagatgatcaggttcttgctggctacactgataaaaataagctagttaatttcaaagcgcctaaagaaatgattggtaaactagtggaagtacgaatagatgaagctaaacagtattcattaaatggcagttttataaaggaagtagagccggaaatggtgattcaataaatgtataataaagatgacgtgttgaaccaagcggataatattgcaaataaaattaaaaatttggatactatcaaaacatatcaacaaattgaagcacagattcatcagaaccaaacgataaagactaaaatggatatgttaaaaaagcatcaaaaacaagcagtaaactttcaaaattacgggaaacaaaatgcgctagaacagtcggaacataccattcagagtatagaagcagaaataaatacattgcccatagttgaacagtttcaaacttcacaatatgaagcgaatcaattattgaaaatgtttgtatcaacaatggaaacacgtttaaatgaccataataaagccaagcatagtgattaattacaaacaaaaaggagaacaatcatatgaaatcaagaaaactggctataactgcacttttaattgcaataaatgttgtattaagcagtattatcatcattcctctaggaccagttaaggcagcaccagtacagcattttgtaaatgtattaagtgcggtcatagtaggtccttggtatggattagctcaagcgcttatatcatcaattttaagagttctttttggtactggtacagcttttgcatttccgggtagtatgattggagttttattggctagtatgttttacatatatcgtaaacatatatttatggccgcggtcggtgaagtacttggaactggtgtcatcggaagtttaatttgtataccattagcatatttccttgggcttcaagacttcttcattaaaccgttaatgattacgttcatagtctcaagtgctatcggatctattataagttatttcttattaattactctaaaaaaacgtggtattcttcaaaggtttataaaataattttatgatatatgatttcaaacagagtcattgttcattttaatattgaacgcccttacttaattaaatgtcttgaatgttagaattttaatttaattctaaacatgctattgacacattttattaggtttgaggcgttttcttatacatttaagatgcttcgtgattatatggtatgaataggtttgtaaaagtaagtatgttaaaatgtataagttaaataattaataattaaaaagcttacaaacgaatatattgtaaagacaaattttaaaaagagacaagggttgtgaagaaataatatgtctaatgttacaccaatgatgcagcaatatttaaaaataaaatcagaataccaagattgcttattattttttagactaggtgatttctatgaaatgttttatgaagatgccaaggaggcatcacgtgtacttgaaattactttaactaaaagagatgctaaaaaagaaaatccaattccgatgtgtggtgttccgtatcattctgcagatagttatatagatacacttgttaataatggatataaagtagctatttgtgaacagatggaagatccgaaacaaacgaaaggtatggttagacgtgaggtagtaagaattgtgactccaggaactgtgatggagcaaggtggtgtagatgataaacaaaataactatattttaagttttgttatgaatcaacctgaaattgcgcttagttactgtgatgtttctactggcgaattaaaggttacacattttaatgatgaagcgactttattaaatgaaattacgacgataaaccctaacgaagttgttatcaatgacaatatttccgataatttaaaaagacaaattaatatggtgacagaaacaataacagtcagggaaacgttatcatcagaaatctatagtgtgaatcaaactgaacataaattaatgtatcaagcgacacaattattgctagattatattcatcatacacaaaaacgtgatttatcgcatatcgaggatgttgttcaatatgcagctatagattatatgaaaatggatttttatgctaagagaaaccttgagttaacggaaagcattcgattaaaatcaaaaaaaggaacgctactttggctaatggacgaaacgaaaacaccaatgggagcacgccgcttaaaacaatggatagatagaccactaataagtaaagaacaaattgaagcacgattagatatcgttgatgaatttagtgctcatttcatagaaagagacaccttaagaacatatcttaatcaagtgtatgatattgaacgtcttgttgggcgtgttagttacggaaatgttaatgcgagagatttaattcaacttaaacattccatttctgaaataccgaatattaaagcattactaaattctatgaatcagaatactcttgtacaagttaatcaactagaaccccttgatgatttacttgatatattagaacagagtttagtagaagaaccaccaatttcagttaaagatggcggactattcaaagttggttttaatacgcaattagatgaatatcttgaagcttcaaaaaacggaaaaacatggttagcagaattacaagccaaagaaagacaacgtacaggaataaaatcattgaaaataagctttaataaagtgtttggttattttatagaaataacacgtgccaacttgcaaaattttgaaccaagtgaatttggttatatgaggaagcaaacgttatcgaatgctgaacgttttataactgatgaacttaaagaaaaagaagatatcattttaggtgcggaagacaaagccatcgaattagaatatcaattatttgttcagctacgtgaagaagttaaaaaatatactgaacgtttacaacaacaagctaaaattatttcagagctagattgtttacagagctttgcagaaattgctcaaaaatataattacactaggccttcatttagtgaaaataaaacattagaattagtggaatctaggcacccagtagtggaaagagtaatggattataatgactatgtgcctaataattgtcgattagataatgaaacatttatatatttaattacaggtccgaatatgtctggtaaatcgacatatatgagacaagttgccataattagtataatggcccaaatgggagcttatgtcccttgtaaagaggcagtgttacctatatttgatcaaatattcactagaataggtgcggcagatgatttggtttcaggtaagagtacgtttatggtagaaatgctagaagcacaaaaggcattaacttatgcaacagaggatagtttgattattttcgatgaaattggacgtggtacttcaacgtatgacggtttagctttagcgcaggcaatgatagagtatgtagctgaaacatcacatgctaaaacgttattttcaacacattatcatgaattgacaacattagatcaagcattaccaagtctaaaaaatgttcacgtcgctgctaatgaatataaaggtgaacttatattcttgcataaagtcaaagatggtgcagttgacgatagttatggtattcaagttgcgaaattagctgatttacctgaaaaagttattagcagagcacaagtgattctaagcgagtttgaagcgtctgctggtaaaaaatcatcgatatcaaatttaaaaatggtcgaaaatgaacctgaaattaatcaagaaaatttaaacttaagtgttgaagaaacaactgatactttatctcaaaaagactttgaacaagcatcatttgatttgtttgaaaatgatcaaaaaagcgagattgaactacaaattaaaaatttgaatttatctaatatgacaccaattgaggcattggtgaagttaagtgaattacaaaatcaattaaaatagaggtgttgcaaaatggggaaaattaaagaactccaaacctcattagcaaataaaatcgcagcaggtgaagtagttgaaagaccgagttctgttgtgaaagaactgttggaaaatgctatagatgcaggcgctacagaaataagcattgaagtagaggaatctggcgtccaatctattcgcgtagtcgataatggaagcggaattgaagcggaagacttaggattagtatttcatagacatgcgactagtaaattagatcaagatgaagatttatttcatattaggacattaggattccgtggtgaagcactagccagtatttcatcagttgctaaagtaacattgaagacttgcacggataatgctaatggaaatgaaatatatgtagaaaatggtgaaatattaaatcataagcctgcaaaagcgaaaaaaggaacagatatacttgtagaatcattattttataatacaccagcacgtttaaaatatattaaaagtttatacactgaactaggtaaaataacagatattgtcaacagaatggcaatgagccatccggacattcgaatagcactcatttcagatggcaaaacaatgttaagtacaaatggttcaggacgaactaatgaagtgatggcagagatttatgggatgaaagttgcacgagatttagtacatatatctggagatacaagtgattatcacattgaaggttttgttgcaaagcctgaacattctagaagtaataagcactatatttctatttttattaatggacgatacattaaaaactttatgctaaataaagcgattttagaaggctatcatacactcttaacaataggtaggttcccgatttgttatattaatattgaaatggatccaatcttagtagacgtaaatgttcatccaacaaaactagaagtgcgtttatcaaaagaagagcaactataccaattgattgtgagcaaaatacaagaagcatttaaagaccgtatattaattcctaaaaataacttggattatgtgccaaaaaaaaataaagtattacattcattcgaacaacaaaaaatcgaatttgaacaaagacaaaacacagagaataaccaagagaagacgttttcatctgaagaaagtaacagtaagccatttatggaagaaaatcaaaacgatgagatagttataaaagaagattcatataatccattcgtaacgaaaacatctgaaagtttaatagctgatgatgaatcttctggttataataatacacgtgaaaaagatgaagactacttcaaaaaacaacaagaaattttacaagaaatggatcaaacatttgattcaaatgatggtacaactgtgcaaaattatgagaataaagcgtctgatgattattatgatgtaaacgatattaaaggaacaaaaagtaaagaccctaaacgaagaattccatatatggaaattgttggacaagtacatggaacgtatattattgctcaaaatgaatttggcatgtacatgattgaccagcatgcagctcaagaaagaataaaatatgaatattttcgagataaaataggtgaggttaccaatgaagtacaagatttattaatcccgttaacatttcatttttcaaaagatgaacaattagtcattgatcaatataaaaatgagcttcaacaagtaggtatcatgttagaacattttggtggtcatgattatattgtaagtagctatccagtttggttccctaaagatgaagtagaagaaattattaaagatatgattgagctaattttggaagagaaaaaagtagatatcaaaaaattacgtgaagatgtagcaatcatgatgtcatgtaaaaaatccattaaagcgaatcattatttacaaaaacatgaaatgtctgatttaattgatcaattaagagaagcggaagatccatttacatgtccacatggtcgtccaataatcattaatttttcaaaatacgaattagaaaaattatttaagcgtgtgatgtagagaggatgaatcaagtgaataacaacatattgcctgctataagaaacattaaagatttagagaaactgattaaaacagactataaaatgtgtgtgcttctagatatgcatataggacatataaaaagtattatggaattgctgaagcaaaatcatatagagtgttttattcatatagatttgataaaaggtttaagccacgatgaatttgcaagtgaatttattattcagcaatacaagccaaaaggtatcgtatcgactaaatctaaagtaataaaaaaagctaaatcattaaatactttaacgatttttagagtatttattattgatagtcaagcattgaaacgcagtatagatttgataaaaaaagttgaacctgattttgttgaagtacttccaggtgttgcgagtaaagcgattcatcatattcagaaagaaacaaacacacaagtcattgcaggtggcctaattaatacaatagatgaagtcaatgaagctgttaaaaatggagcgaaatatgtaactactagttatgataaactttggtaaatcataagtctgcaaaaatttcatttttcacgagatttagtcatataacataataaaaaagccgttttcatatgggatatgcagtaggtatcaaacaaaaaataatcaaataaaataattagcacctctaaaacgattaaaatcattaaagttttagaggtgtttattagtaaaaaatgcaactagtcataaaaaatatggctgaagaatgtcaattaaacaaaagagcgtcataaataaattagttaggattggtatttctagttttcaaattaaactacttttataaagacttgaaaaattaaatttgacaaaatttttacaaaaaccattgacaacgctttcatatcgatagtatcataacaaatataataaaagttaatacatagaatagagacgggagatttctacgagccaaactgctagtgtaggaatctctttgtctttttgggaggacatttaatatgaatgtatatttagcagaattcctaggaactgcaatcttaatcctttttggtggtggcgtttgtgccaatgtcaatttaaagagaagtgctgcgaatggtgctgattggattgtcatcacagctggatggggattagcggttacaatgggtgtgtttgctgtcggtcaattctcaggtgcacatttaaacccagcggtgtctttagctcttgcattagacggaagttttgattggtcattagttcctggttatattgttgctcaaatgttaggtgcaattgtcggagcaacaattgtatggttaatgtacttgccacattggaaagcgacagaagaagctggcgcgaaattaggtgttttctctacagcaccggctattaagaattactttgccaactttttaagtgagattatcggaacaatggcattaactttaggtattttatttatcggtgtaaacaaaattgccgatggtttaaatcctttaattgtcggagcattaattgttgcaatcggattaagtttaggcggtgctactggttatgcaatcaacccagcacgtgatttaggtccgagaattgcacatgcgattttaccaatagctggtaaaggtggttcaaattggtcatatgcaatcgttcctatcttaggaccaattgccggtggtttattaggtgcagtggtatacgctgtattttataaacatacatttaatattggttgtgcaattgcaattgttgtagttattattactttgattttaggttacattttaaataaatcatcaaaaaaaggtgatatcgaatcaatttactaaaataaaaagaaacgtaaatagcataatttaacatgtttgattcatggattatgctattttttcgccaaaatttaacagattttgtacaatgggttagcgattattttttaataaaggagatactactaatggaaaaatatattttatctatagaccaaggaacaacaagctcaagagcgattttattcaatcaaaaaggggaaattgcaggggtagcacaacgtgagtttaagcaatattttccacaatcaggttgggttgaacatgatgcaaatgaaatttggacatctgtgttagctgtaatgacggaagtaattaatgaaaatgatgttagagctgatcaaattgcaggtatcggtattacaaaccaacgtgaaacaacggttgtttgggacaaacatactggccgcccaatttatcacgcaattgtttggcaatcacgtcaaacacaatcaatttgttcagaattaaaacaacaaggatatgaacaaacatttagagataagacaggattacttttagatccgtattttgcaggtacaaaagttaaatggattctagacaatgttgaaggtgcacgagaaaaagcagaaaatggcgatctattatttggaacgattgatacttggttagtatggaaattatcaggaaaagctgcgcatattactgattattcaaatgcgagtcgtacattaatgtttaatatccatgatttagaatgggacgatgagttattagaactacttacagtacctaaaaatatgttgccagaagttaaagcttcgagtgaagtatatggtaagacaattgattaccacttctatggtcaagaagtaccaatcgctggagtagctggtgatcaacaagcagcattatttggacaagcttgcttcgaacgtggtgacgtgaaaaacacatatggaactggtggcttcatgttaatgaatacaggtgacaaagcggttaaatctgaaagtggtttattaacaacaattgcttatggtattgatggaaaagtaaattatgcgcttgaaggttccatctttgtttcgggttcagcaatccaatggttacgtgatggattaagaatgattaattcagcaccacaatcagaaagttatgcgacacgagttgactctactgagggtgtttatgttgttccagcttttgtaggtttaggaacaccatattgggattctgaagcacgtggtgcgattttcggtttaacacgtggaactgaaaaagagcactttatccgtgcaactttagaatcactatgttaccaaactcgtgacgttatggaagcaatgtcaaaagactctggtattgatgtccaaagtttacgtgtcgatggtggtgcagttaaaaataactttattatgcagttccaagcagacattgttaatacttctgttgaaagacctgaaattcaagaaactacagctttaggtgctgcatttttggcaggtttagcagttggattctgggagagtaaagatgatatcgctaaaaactggaaattagaagaaaaattcgatccgaaaatggatgaaggcgaaagagaaaaattatatagaggttggaaaaaagctgttgaagcaacacaagtttttaaaacagaataaacttgtagattagacttttgtataaacattgtgatacaatcaatttaagttaatatttgaatcgagaagcgagagatttgttcgaacatgtacaattgaaggattgtttatgtgggacaagtctctcgtttttacattttttaggaggcgttttggaatggcattgtctacttttaagagagaacatattaaaaagaatttaagaaatgatgaatatgatttagtaattattggtggcggtattacaggtgcaggtattgcactagacgcgagtgaaagaggaatgaaagttgcattagttgaaatgcaagactttgcacaaggaacaagctcaagatctacaaaattagtccatggtggtttgcgttacttaaaacaattccaaattggagtagttgccgaaactggtaaagaacgtgcgattgtttatgaaaatgggcctcatgttacgactccagagtggatgcttttaccaatgcataaaggtggaacatttggtaaattctcaacatcaattggtttaggaatgtatgatcgtttagcaggtgttaagaagtctgaacgtaaaaaaatgttatctaaaaaagaaactttagctaaagaaccattagttaaaaaagaaggtctaaaaggcggcggttactatgttgaatatcgtactgacgatgcgcgtttaactattgaagttatgaagcgtgctgctgaaaaaggcgcagaaattatcaactatactaaatctgaacacttcacttatgataaaaatcaacaagtaaatggtgttaaagttatagataaattaactaatgaaaattatacaattaaggctaaaaaagtggttaatgcagcaggtccatgggttgatgatgttagaagtggtgattatgcacgcaataataaaaaattacgtttaactaaaggtgtacatgttgttattgatcaatcaaaattcccattaggtcaagcagtatactttgatactgaaaaagatggaagaatgatttttgcaattccacgtgaaggaaaagcgtatgtaggtactacagatacattctatgacaatatcaaatcttcaccattaactacacaagaagacagagactatttaatcgatgcgattaattacatgttccctagtgttaatgttacagatgaagatattgaatcaacatgggcaggaattagaccattaatttacgaagaaggcaaagacccttctgaaatctctcgtaaggatgaaatttgggaaggtaaatcaggtttattaactattgcaggtggtaaattaacaggctatcgtcacatggctcaagacattgttgatttagtatctaaacgcttgaaaaaagactacggtttaacatttagtccatgtaatacaaaaggtctggcaatttcaggtggcgatgtaggtggtagcaagaactttgatgcgtttgtagagcaaaaagtagatgtagctaaaggattcggcattgatgaagatgttgcaagacgtttagcatctaaatatggttcaaatgttgatgaattgttcaacattgcgcaaacatctcaataccatgatagcaagttaccattagaaatttatgtagaacttgtttatagtattcaacaagaaatggtatacaaacctaacgatttcttagttcgtcgttctggtaaaatgtatttcaatattaaagatgtattagattataaagatgctgtcatcgatattatggcagatatgcttgattactctccagctcaaattgaagcatatactgaagaagttgagcaagcaattaaagaagcgcaacatggaaataatcaaccagcagttaaagaataattaatttgtacaatcataaactggtgtcctgttttaagggcatcagtttttttatacgagatacattagtcaattgaaactatgcatcactaaatgtatgataataataaaagcgaatataaaagcgttgttattaaaggtgtgagatgatgactgaaaaacaatttaaattaactgtacaagataatacgaatattgaagttaaagtgaattttacagatgtagattcaaaaggaattattcatatatttcatggtatggctgaacatatggaacgttacgataaattagcacatgcactttcaaagcatggcttcgatgtgatacgtcataatcatcgaggacatggtattaatattgatgaatcaacaagagggcattacgatgatatgaaacgagttatcggtgatgcctttgaagtagcgcaaacagtgagaggcaatgttgataaaccatacattataatcggacattcaatgggatccgttatagctagattgtttgtagaaacatatccgcaatatgttgatggtctaattttaagtggtactggtatgtattcattatggaaaggtttaccaaccgttaaagtgttacaactgattacaaaaatttatggtgctgagaaacgagttgaatgggttaaccagttagtatcaaatagttttaataaaaaaatacgtccattacgtacacaaagtgattggatttctagtaatccaattgaagtagataactttattaaagatccatatagtggatttaatgtgtcaaatcaattattatatcaaacagcctattatatgctacatacatcacaattaaaaaatatgaaaatgttaaatcatgccatgcctatattattagtttcaggatatgacgatcctttaggtgattatggtaaagggattttaaaattggcgaatatatatagaaaagctggcattaaaaatgttaaagtgaatctttatcatcataaacgtcatgaagtgttatttgaaaaagatcatgacaaaatttgggaagacttgtttaaatggttgaatcaattttataaaaaataaagaaagtggaattaaatatgaataaaaataagccttttattgtagtaattgtggggccaactgcttcaggtaaaacagagcttagcatcgaactcgcgaagcgtatcaatggtgaaatcataagcggtgactctatgcaagtctacaaacatatgaatattggaactgcaaaagtaacacctgaagaaatggatggtattccacatcatttaattgatatcttgaatcctgatgatacattttcagcatatgaattcaagcgattagcagaagatttaattactgatataacgaatagaggtaaagttccaatcatagcaggtggaacaggcttatatattcaatcattaatatataattatgaattagaagatgaaacagttacacctgcacaattatccatagttaaacaaaagttatctgcattagaacatttagataatcagcaactacacgattatttagctcaatttgatgcggtttctgcagaaaatattcaccctaacaaccgccaaagagtgttgcgcgctattgaatattatttaaaaacaaaaaaacttttgagtaatcgcaagaaagtgcaacaatttactgaaaattatgatacattattattagggattgaaatgtcgcgtaaaacattatattcaagaataaataaacgtgttgatattatgttggatcacggattatttagagaagtgcaacaacttgttgaacaaggctatgaatcttgccaaagtatgcaagctattggatataaagaattaatacctgtgattaacggacaaatgatttatgaagatgctgtcaatgatttaaagcaacattcacgccaatatgcaaaacgacaaatgacatggttcaagaataaaatgagtgttcattggttagataaagaaaatatgtcacttcaaatgatgttagatgagattacaacccagattaagtaaaaggagtccgacagatgattgcaaacgaaaacatccaagacaaagcactagagaattttaaagcaaaccaaactgaagtaactgtattctttctaaacggtttccaaatgaaaggtgttattgaagaatacgacaagtatgtcgtaagcttaaattctcaaggcaaacaacacttgatttacaaacatgcgatcagcacttatacagtagaaactgaaggtcaagcatctactgaaagtgaagaataagttgtaatcatatgggcacgatttaatgactcgtgtacataacgtttgaagtatgataaatagatatagaaataaagtcatatgtgacatcaattaaatgatgttcaaatgacaagatacaatagaggaatgtttgtaataaaaacgcttcatataaaggtcgagtcaatatatgatacgactttatatgaagcgttttatttgctatgagctagtatattttataataatttttctatttctctttcgatttgaacaggttttttttgaggtgcaaatcgtttaacaacgttaccttcgcgatccactaaaaacttagtgaaattccatttgattttctcattaaagaatccgtgttgtgccgcagtcaaatatctaaataaaggtaattgatgttccccttttacgtctattttttgatgcatagggaaggtaacaccatagtttaatttacagttttgagctgcttcttcgcctgaaccaggttcttggccaccaaattgattacaagggaaacctagaattacaaacccttgatctttgtatttctcgtataatgattgcaaaccttcaaattgtgaagtaaagccacattcgctagctgtattaacaattagcataacgtcacccttatatgcatctaatttgtaagtaacacctttatttgtttctactacaaaatcataaattgtctccattgtatcatcctttcgatttacttaaaatgtaccacaaaatcgtgtaatagtctttactaaaactctatgatagaatactttgagtaggattttattaaggagatgtataacatggctcagcaacaaattcatgatactaaaaataaactagaaaaagctgtcttagtcggtgtacatgctcaagatgataagcaatttaattttgagtctacaatggaggaattatcatctttatcagagacttgccaacttgaagtgttgggtcaaattactcaaaacagagatcgtgtagatcgcaaatattatgttggtaaaggtaaaattgaagaaattcaagcatttattgagttcaaagatattgatgtagtcatcacaaatgatgaattaacgactgcacaatccaaatcactaaatgaagctttaggtgtaaaaattattgatagaactcagttgattcttgaaatatttgcattaagagcaagaagtaaagaaggtaaattgcaagtagagctagcacaacttgattatttattacctagattgcaaggccatggtaaaagcctttctcgtttaggtggcggtattggaactagaggccctggtgaaacgaagttagagatggatcgcagacatattcgaactcgtatgaatgaaattaaacatcaattgcggacggtagaagaacatcgcgaaagatatcgaaataaaagaaatcaaaatcaggtgtttcaagtagctttagttggttatacaaatgctggtaaatcatcatggtttaatgttttagcaaatgaagagacgtatgaaaaagatcaattatttgcaacgttagatcctaaaacacgacaaattcaaataaatgatggatttaatttaattatttcagatactgttggttttatacagaaactacctacgacgttaattgcagcttttaaatcaactttagaagaggctaaaggtgcagatttattagtacatgtcgtagatagtagccatcctgaataccgtacgcagtatgacacagttaatgatttaatcaaacaattagatatgagtcatatttctcaaatagttatttttaataaaaaggacttatgtgatcatgcatcaaatcgtccagcaagtgatttgcctaatgtttttgtttcttctaaaaatgatggtgataaattacttgttaagacgttatttattgatgaaatcaaaaggcaattaacttattatgatgagacaattgcgacgaataatgcagatcgattatattttctaaaacaacatacattagtgactgaacttaaatatgatgaaattgaaaatgtttatcgtataaaaggatttaaaaaataataaaaggacgaaattcaaatgaaagatataagtaagatagtagctgacgtcgaatcaacgttagcaccatattttaaagaaattgaagaaacagcatatattaatcaagaaaaagtattaaatgcatttcatcatgtcaaagcaaccgaaagtgatctacaaggatcaacaggatacgggtatgatgactttggacgtgatcatttagaagaaatatatgcgcaggcatttaaagcagaagatgcaattgttcgtccgcaaattatttcaggtacgcatgcgattactattgcattacaaagtttattaaaacatggtgatgaattaatttatataacgggtagtccatatgacactttacttgaagtcattggcgtaaacggaaatggtattgaaagtttaatggagcatggcgtatcgtataaagatattgcacttaaagaaggtaagatcgatattgaaagtgtgttagatggggtttctgagcgcaccaaagtaatagcgattcaacgttcgaaaggctatgatcaaagaccttcaattccgctagatgaaattgaaaaggtaattactaggttgaaaaacgtgcatcctaatattttaatatttgtggataactgttatggggaatttgttgaaagacgtgaacctatagaatgtggtgccgatttaatagcaggatcattaattaaaaaccctggcggtggtttagctaagattggtggatacattgctggtagaaaagatttaattgaacgatgtggttatagattgacagcacctggtattggtaaagaagcgggtgcatcattaaatgcattgcttgaaatgtatcaaggtttctttttagcaccacacgttgtcagtcagagtcttaaaggtgcattgtttactagtttatttttagaaaaaatgaatatgaacacaacgccgaagtactacgaaaaacgaactgatttaattcaaacagttaaatttgaaacgaaagaacaaatgatttcattttgtcaaagtattcaacacgcatccccaattaatgcacattttagtccagaacctagttatatgcctggttacgaagatgatgttattatggcagctggtacgtttattcaaggttcatcgattgaattatctgcagatggacctattcgtcctccttatgaagcatatgttcaaggaggattaacatatgaacacgttaaaattgctgtgacaagagctgttaatcagttgaaagaacaaggacttatataatagattaaatttcaccctaaatgataatgtgttttgggtgaaattttttgcggagatttatcagattatttttaaaaattgaaaaaatattttagctgtagattgttttatgtcgttttagaagtcgaaatcgcagttatatcaatgttttaagctttatgttagaaaacctgacatatttttgaaatcctaaaaaaattatgataagttattaacaagttcaaaagtagaggagaggaacaatgatatcgaatgatgcaatcagacgaaatatggctgtcttctctatgagtgtagtaagtaagttaacggatttaacgccaaggcaaatacgttactatgaaacacatgaactcatcaaacctgaaagaacagaaggtcaaaaacgtctgttctcactcaatgatttggaaagattactagaaattaaatcattattagaaaaaggatttaatatcaaagggattaaacaaatcatttatgactcacaagagcatttaacaacagatgaacaagagataagaaaaaagatgattgtagatgccacgcaaaagcctattggagaaactttgccaataaatcgtggtgatttatcccgatttattaaataaaatttggaggattttaaaatgccaaaacgtactttcactaaagacgacattcgtaaatttgcagaagaggaaaatgtaagatatttaagattacaattcactgatattttaggaacaattaaaaatgttgaagtgcctgtaagccaattagaaaaagtacttgataacgaaatgatgtttgacggttcttctatcgaaggtttcgtacgtatcgaagaatcagatatgtacttacatccagatttagatacttgggtaatcttcccatggactgctggacaaggtaaagttgcacgtttaatttgtgatgtatataaaacagatggaacaccatttgaaggggatcctcgtgcaaacttaaaacgtgtattaaaagaaatggaagatttaggcttcacagactttaacctaggacctgaaccagaattcttcttgtttaagttggatgaaaaaggggaaccaactttagaacttaatgatgatggtggatatttcgatttagcacctacagatttaggtgaaaactgtcgtcgtgatattgttttagaattagaggatatgggcttcgatattgaagctagtcaccatgaagttgcccctggtcaacatgaaattgactttaaatatgcagatgctgttacagcatgtgataatatccaaacatttaaattggttgttaaaacaatcgcacgtaaacataatttacacgcaacatttatgcctaaaccattattcggtgtgaatggtagcggtatgcactttaacgtttcattattcaaaggtaaagaaaatgcattctttgatccaaatactgaaatgggcttaacggaaactgcatatcaatttacagcaggtgtgcttaaaaatgcacgcggatttactgctgtatgtaacccgttagtaaactcatataaacgtttagtacctggttatgaagcaccatgttatattgcatggagtggtaaaaaccgttcaccattaatccgtgtaccatcttcaagaggattatctactcgtatcgaagtacgttcagtagatccagctgcaaacccatacatggcgttagctgcaatcttagaagctggactagatggtattaaaaataaattaaaagttccagaaccagttaaccaaaatatttacgaaatgaaccgtgaagaacgtgaagcagtaggcattcaagacttaccttcaacactttatactgcattaaaagcaatgcgtgaaaatgaagttattaaaaaagctttaggaaatcatatctataatcaatttattaattcaaaatcaattgaatgggattactacagaactcaagtctctgaatgggaaagagatcagtacatgaagcaatattaatacgctaaacaatgatgggaaatcagtaatatcaagggctagagcattttgctttagctcttttttgatttggaaagatgggatttcacttgaccacttttgttaaaaaatggatttggtcaagttttggtcaagtaaatgttttatgtatttatttttttaaagctggggaagaccattttatattttagttcacatgaattttaatatatttggaggtgatgagatgaggcgataaaagaacgtcgcgaaaacgttgagtattacttgaaaatagccatattcatattacttctcatcgaattcatttgcagaacgttctaaggtaagaccccgaaaagagggaccttactacgcattattaagggggtaatactatatgaaaagagaaacaaaacaaaaaatatctttttgtttatcgatcggtattttcattttagttatactactattgatattctaaaaaattaaaaatttcgcctcatctaatttatgaattgctatgatgaaatattcaatacaatcaaagaattgatagaaaacaaagagatatcgagttatcaaattaataaagatactgggataagttacggtaatattaatgctatgcgccgtagagaaagaagaatagaaaatttaagcttaaagaatgcaaagatcttatatgaatatgcgaaaaaggtattgtaatataagcattgagttcaataggcatacaataactgcccaaactagtgactgagtgggtgcttttatagtattaaaagttttctaaaagtgaaagaaatcatgtttagtgatttacttatgtttttcaaaatagtataataattttatataatatatagagcttcagtataccttttgagtatatatggagttctttctttttatacaagatgtatatgtataaatggaaatatttaatacattacataaaaacctttaggtgcacttagagggatgttaatcataaaaaaagagattttgaaaaatataggctattatactttagaattacaaattataaatcttgccagtggatatgggagttcaacatgtcacttaccccaatttgtggaatgttaaataactataaagaggaaaggagaaaaaatgataagaatggttaaagaaaaagaacgaatagcaaaattaaatttcgaatagctgtgacgagcttaataattcaagtacttaattttatcaaatcgttcttttaaaaaggtaaagggcaaaagacctttaccacattaaatagggaggtggtatttatgacaagagaattaaggaaaaaattaactctctatcttaacattgcaactttaatattatttattattaatttaactagaaaaaaataaattattctttcattttgacaaaaattatgaaccagtttaaagaaatttataatacaatagaaaaattactaaatgataaatcaatatctaattatagaattaatcaagacactgatgtttcttatggtggtataagtgaattaagaagcgggaaaagaaaagtgaataatttaactttagaaacagcggaaaaactctataattaccaaaaacaattagaaataatgattgaagattaaaataaggccatatttttgaaatatcatggagtgagccttttaagtcatctaattttaaagtatattaaatatggataacttaatgtgaatataaataaaaaattatcaaataatataatatagaatagatggagacaagaaattttatcaatatataaaaaaaacgccaatactattaggtattagtttatgaattaactagtttggcaactagaaaaaaacaatgtattgctaaacgtagttactgcattaggattattataattataaatagaaagagagtgtgattaataatgaatgagattgaaactattataagtgaaatagaaaagttattaactaacaatacaccatatagtatttcaaaaaactcaggtgtaccacgtcaaacagttactgatttaaaggtaggtaaaactaaaataaaagaagctaaatttaaaacgataatcaagttatatgaatatcaaagaacattagaaaataaaacagaatgttaacaaaaatattttgttaggttaggtggacaagaaattaaatttctaatgatttcatggttgtctgtccacgttttgtccacctcaataagataatctcttagttttagaaattgtacatggttaaataatcaaaaatgcatattatgaaattatcattgccattaaatcttgaatgatctttaagcgatgatataaaaggctgaacacagtaaataagttaactttaatgcagtattctatactatacatattttgtaataatgtttatgcacataatttttcattgacaattttttatattaaattgtgtaattggcatatatgatgatttgtgataattatattgtaatatagcatttggttttatgattctaaaattaatagatttgaaaagtatactttatttcatgaaagtttttggtacatttatttgaaaatgtttttattacaaagttacatggctaaatgtttcttaacaaaattaatttttcgagtgtaaagaatcgtgtggtaaacataatttatatagattataaggaggtgaaaatggtcgaggaagttaaaacgataaaatagtttgaatgttttgatttcaattctggtaggactattgaatttgcaatctaataagaatgtgaggtttgatttaatatgaagtcatattctttgaataaaatattactttctcaccattagtaaaatgaagatgactattaaagtgcgaaaaacaaataaaaaagagaaaatagaatttttaatagggacgtttataattattttagtaatattagggttcaaaattatgaaataaatgtatagtatttgagaagtctatatgactccggaaaaattaaattctaaagatatctcaatatctcaaatttaatagactactggagttagtagtttgaatattgaaagacactaatctaataaaaatacataaaaggttaaactttagaagtggctgtaaacttcaatgaatactaaacattgaagttttgtaaaaggcgtaaggtatacaagacaaatcgtttatctttgacaaagtaattgatgatgaaaagtcgttaatatgtagaaacaaaaattgaaaatataaaatttaactattatgaagtgatgatagccattaatgaatagaaaaataataaaatcatttatagataaaaaatacgttaagttcacagaatttcgaaaaaaagcagaaaacattgtacagatatggagatgaaaaaatgtcagaatacaagaaaaaaataattgaattaattgaaagtaatttaacaggatatgaaatttctaaaaaaactggagtttctcaatacgtactttcacaattaagacagggcaaacgcgaagtagataatctaaccctgaatacaacagaaaaattatatgaatatgccaataaagttttgtaatttaactaatgtataaattaatcaagctatgtttatttgatttaactattaataaaaatcatatggtgaatggatattataataattaaaatacaaaaatagtagattccaatttgtgaaaaaggagtatgtcgtttcatttagaatttattgcacgaaattagcatcgaataagggaaaataagtgttaagttttaaatgataaaaaagattggaatggatcgtcttgaaatgctcccttcaaagttttcattttttcaatgtcgacttcgaagggggcattttcattaaattgttatagctttttatatttgtataatgaacatataagtttaagaaggtgcgagtgaaggaaataaaaaagctcaaatgtaccaaattgttaatcttaataaatctctactttataaagattgaatggacattcgagcgttaatcagtcaggagggactttccctcctacaatttaataataatacttgcttcaccactatacaaggagtgagttgttatgttcaaagtgaattattcgattttaagttattatccagaatataatatcgcagtaagttggcaacgtttaagagaaggaaaaacaataaaaaacaagatttaatactgctgcgtcatgaggcgcttgaacattatttgatgaataagtataatttcaactatgattatgcacataaaattgtatcaaaaaaatacgattattcaatttttataaaaaagaaggtggattaaatgcttacattaataaaattgaaagaagatgaacaggttataatatatgaatatatacctgaagatgatataagtaacggtaaaggttcagtaacttttaataaaaaagatgcagaggttatagatttctcattatctgaaatagaaaatgaagaatattttatgttatatcgtaataagtctttttctgtagtaagagactttatcgagaagcaagaatttcccgaaaattataaaatagcatggtattaaagcatcctttctacacagataaagagaaagcgatgctatttttatatgcttttttcattattcgttgaaaaagaagagtcacaaaagttaacatatttaaaagaacttggtgaagatggcgaatataaatatgttgccaaaatagatagtaaaacatctaaattatgtcattcactcaacggaaaaatatttaaagttaaagatatgataccaggtgtgaatgcgccacctatgcatccttggtgtagaagtaccacagtgccacatgtcggcaattggcgagacaagttctttaaagagcgtgaaggtaaatatcaagtagaaggttgttttattgaatcaggtgcacttaataataaaagtgatgaatacggtatcaaaaggaacagacatgctcaaatttattataattcagttagaaatcgagataaacagatagagatttctaaaattgctaaaaatactaatataaataaaaatttaattcaaagagtttatgaacatatatttgaaaataagtatttattagaaagtggatttaaacaatttgatcctgacttttatatggctcaaagttggcaacgtttaagagaagggaaaaatattaaaaaaatggatataataatgtagaaacatgaagctcttgaacactatctaatgaataagtataatttacactatatagaggcacataaacttacagaaataaaatataattatagtattttaattaattagaggtggaaatgattgctaatattaaaaataaaagaaattaatgataaaagtgttacatataaatattttcctaataatgatgaaaatattaagcctggtattattcaaatggatatagatagtcttgaagttatcaatgctgaaaaatctagtttagaaaaaaatacaagagataattattttattcatgccatagacagaatatacataaatactagtaaagggctatttcctgaatctgaactcgtagcatggggataaagaaagtttactttaaaaattttaaccttcaaatgtgaaggttattttttattgtccaaaacgtgctgatgacattttaaaagcaagtatggaatatcagtcgacagactataaacggaggtatatctcatggaaaacaatgatagcaatgaagtagcttatttgttaaaagatggtaaatttacaaaagtatatgtcaatcaagatagtgtatcttttgtgccagggtaacaagcaaccgaattattatttaacagtaaaccgaattcaattgttatgttacataaccatcctggacagtcaggattttcagaatatgatttatttacattttttaagcatccatcaataaaatcaatgacaatcgttactaataagggacaagtaaaatttattaccaagtcaaataggtttcatggtaaaatagtgagtaaattttgtgctaaatattttacgcatattaatatcattaatgatagccatattgaaaaattattgaaaaaactttatagtataaatatgattaaatataaagtgagatgattttaattatgttagattcacaattagatggaaatgtaactgcaaaagaattgagtgaatcttttaaagaattagttgaagaatttgaaagtatagaaaaagcgaaaaagaattcaaattcaaaagataaatagcatcctttttagacagataaagagaaagtggtgctatttttatacgcttttttaactatttactgaaaatgcagaagcacaaaagttaacatatttaaaagaacttggtgaagatggcgaatataaatatgttgccaaaatagatagtaaaacatctaaattatgtcattcacttaacggaaaaatatttaaagttaaagatatgataccaggtgtgaatgcgccacctatgcatccttggtgtagaagtaccacagtgccacatgttggcaattggcgggacaagttctttaaagagcgtgaaggtaaatatcaagtagaagtaaaagaagcataattacaggaaaaagctaaaaaccagatgaaagaaatgattaaaaatggtaaaataaaaatagaaataaattgcggaaaataaaatagatatatgttaggtcatcacctatataatgaaaataaaaaaagagccattttaaataataagaaattgcctagctatacaatactttctatagatttattgaatgaattgttaagagaaaaaatgtcaacaggcaatctaatattaagtgatgagcgatttgatttgaaagagattattaattttaatcaaattattggaaaaatacatatcgaaaatgtgtatattgaaaccagaaagggaaaagtgcattattcgaagacaggtgctcatatagtaccttatattgataagtaggtgaaaagtattgagaattgaagatgcatatcgtaaagatgttattatcacgcttttgaataatgaagaatacgaagggtttgtaactgactatgaaaatgaattcgagagcgaaacaggaaatcttgttgtagatatacagactgattttgctgtttattcgtttgatgaaactgagataaaaagtattagattattaaaataattacaaaatagcatcctttctacaaaaagctaaaaaagaaatgcttgaaatgataagtaatggtaaaatgacgatgaaattgaataatgttaagcaaaagcgtcatattttatgcacaaatgaatataataataagaaaaataattcatctttattaccaagttatactataatagattctaatgaaagtgaaaagatgactaaaaaagaatttattgatattccagttttgtttgatgatgaagggaattttagaataaaacaagttatagattataaaaagataataggtaaatcttatgtgaatggtaaatatattgaaacgaaattaggtaaggttcattattctaaaactggttttcatgtagttccgtatattaaaaaggagtgattaaatatgaatttacagtcatacataggcaaattagtcaaattaacgcttactaataataaaatattaattggaaaagtgatagactttgatgataaagttgataattttgatggttataattcgatagaaattgatacaggtagaattacatatgatatatcagaaaataaaattaaaactattgttttacaataatagcatcctttctacacagataaagagaaagcggtgctattttttgcgcttttataacaactaaggatacaagacacataacttcaacaatatcctcatctaaacctatcgatttcctaagctcaattttaaacacaaagtttatttgaaatgatgcacacctataaaaatcttaatcatcgaaaagtcacaaacatctccatattaaaaacttaaatagtgcattccatttaaactaaacatcgatattcctaccaatatagacttagtaattcgattgttaatacattactttcataaaataactacaaccatcataatacttctcaaatgtcgtcaaattaaagtaaatacagcacaaattaacatttttaaatatataaaataaaacaagatactcaataatctgtagtaccttgttttggaataatgtaattttatatcatcaacggctacaaatgagcagtttcatatataaataaacacatctactcaactgatcttaattaattaataaatgatttaccagatgacatataacagcattattagattaattctaatagtttatttaaattttcttcggttgtcgcccaactggttgcgaatctaacaacacgatgttgatcatcgtatttttcccaaacagcaaatttaactttttgttctaactctgctattttctcgttacttaaaataaaaaattgttgattggttggagaatcaaagtaaagacgatagcctttatttttaaacccgtctttcatcttatttgccatttcgatagcatgtctgcttatattaaaatataaattgtccgtaaataattctaaaaattgtatgcctgttaaccgtccttttgctaaaagggcaccgtgatgcttgattcgagtggtaaattgtttcggttcattatttttcgtaaaaacaatggcttccccgcataatgcacctatcttcgtaccacctatataaaatacatcacaatatttagcgatgtctttaatagtcatatctgattggtcactcatcaatccataccctaatcgtgcaccatccataaataatggaagctgatattgcttacatactttgcataactcttccaattctgatttagagtataatgtgccatattctgtaggatgagaaatatataccattcctgggaataccatatggtcctttttaaaatcacttttaaatgtctccatgtaagtttcaacatctgaagcactaacttttccttccttagagggtatagtaattactttatgtccactatattcaattgcaccgccctcatgcacagcaacatgaccagtgtctgctgaaatgaccccttcgtaactttctaacattgaattaataacaacctgattggtttgtgttccacctactaaaaaacgaattgtagcatttggacagtcaattgtatctttaatcttttcaattgcctgagctgtgaattgatcaaagccatatcccgaagcttgtacaagatttgtatctactaatcgttttaatactttttcatgagcaccttctaaataatcattttcgaatgaaatcactacatttccccctaaaactaatatcaacattttaataagataaaccaatttcaaaactagttcgatatttaaaatgtattatgaatggttaaagtttgtatcgcattatcgcgaagttgaataaatatattatacatcaaacaatacattatgaaaattaattaattttttatcacagcgacttttcatgctggaacacatgtattaatgattgaattttactgttaaaagttctatgatttaggaaatagagaaaagaggggatttaaatggaacaaattaaacttaaaacttttacagctgagactttagagttattagaaaaaaacattaatgcttttttaagttctgaagaagctacaaatttaaaattagtaaatattactattaaagaaatagaagaaagaacattcccaaataatgaagaagaattcaatgcaattttaactttatctgtgaataaataatatgacgtgaaaggtgcaaaatgtttttttgtgcctttctttataggagaaaagactatgcgatttacattttcaaacgatttaggaacgttatttactattattttagccattggattcatcattaatttagtattggcttttattattatctttttagaaagaaataggcgtacagcgagttcaacttgggcatggctatttgtactttttgtcttaccattgattggttttattctttacttgttttttggtagaaccgtttcggcacgcaaattgaataaaaacaatggtaacgtgttaacggatttcgatggacttttaaaacaacaaatagaaagctttgataaaggtaattatggtactgataacaaacaagttcaaaaacatcatgatttagtacgtatgcttttgatggatcaagatggttttttaactgaaaataataaagttgatcatttcattgatggaaatgatttatatgatcaagttttaaaagatattaaaaatgcaaaagaatatatccatttagagtactatactttcgctttagatggtttaggtaaaagaattttacatgctttagaagaaaaattgaaacaaggtctagaagtaaaaatattatatgatgatgttggatctaaaaatgttaagatggcaaattttgatcattttaaatcgttaggtggagaagttgaagcattttttgcttcaaaattaccgttattgaatttcagaatgaataatagaaatcatagaaaaatcatcgtaatcgatggtcaactaggttatgtcggaggatttaacattggtgatgaatatctaggattaggaaaattaggatattggagagatacgcatttacgtatacaaggggatgcggttgatgcactgcagttgcgatttattttagactggaattcgcaagcgcaccgtccacaatttgaatatgatgttaagtatttccctaaaaagaacggaccattgggcaattcaccaattcaaatagctgcaagtggcccggctagtgactggcatcaaattgaatacggttatacaaaaatgattatgagtgcaaagaaatctgtatatttacaatcaccatatttcattccggataattcatatataaatgccattaaaattgctgctaaatcaggtgtagatgtacatttaatgattccatgtaagccagatcatccattagtatattgggcgacattttcaaatgcctctgacttattatcaagtggtgttaaaatttatacgtatgaaaatggatttatacattctaaaatgtgcttaattgatgatgaaatcgtatcagtgggcacagcaaatatggactttagaagttttgaattaaattttgaagtaaatgcctttgtatatgatgaaaatcttgctaaagatttaagggtggcttatgaacatgatattacaaaatcaaaacaactaaccaaagaatcatatgccaatagaccgctgtctgttaaattcaaagaatcgttagcaaaattagtttcgccaattttataatttatttgtaaggagtctcgattatagaggctctttttattttgcccaaaattaaaataacgataaatatattatgtaaatctaataatgacatttgtcatttcaaatctatgacaaagtgttctattttaaatctaataaatttactaatattaaattaagaaaaaaatagaggtgattaaattgattcaaatatctaatatcaacaagtcatttaataaaagatgtgttctaaaaaatatttcgttcgatattgaacaaggtaaatgtatcgctttaattggaaaaaatggtgctggaaagtcaacgttaattgatatattaattggtaatgttaatgctaattctggtgagatatttgataaagacaagttattacaaagtgaaaatcgcagtataatgttccaaaaaacgatgtttccagatcaattaaaagttattgagattatcaacttatatcaatcattttacgaaaatccattaccattggaagaaataatagaactgacgaaatttgattctagtcaactgaaccaatttgtaaataaactttctggtggtcaacaacgattactcgattttgtattatctttaatcggacaaccacaattgatcttattagatgaaccaacatcgactatggatatagaaattagagaatatttttggtcaattattgaaaatttaaaagaagataatcgaacgatactctatacatcgcactatattgaagaagtcgaacgtatgtcagacaaaattattctcattgaaaatggagaaataatacttaatgattcaacgtcacatattagaaccaatcagcaatctcagattacgttatccgatgaatatataagaaagttaaaactagataaagatgatttagttattcaaaaaaatcataatggcactatcaaaattattacttcaaatgtaaatgatacgattttatatcttcaacaacttcatattaatttggatgatattgaaatacaaaaagtctcaattgttgattcatacttcaacaataaaaagcaaaggggatctaattatgatactaagttacttgaaaatcgaatttaaagttataatgcgtaaaaaaacaacattaatattatctattttatttcctgttatattctatatattatttacttcgatattggaattgccggaagatgttaaacctaaattttataaagagtatatgtatagtatgacggtttatagtttgttaagttttagtttactaacttttccattagatattattaatgaaaaacaaaatgaatggcgccaaagattaatggtaacaccatttacttttactagttattatatttcaaaagtagtgaaaactatgctgcaatttgcaatagcgatattagttatttttatggttggacatttttataaaggtgttgcaatgagtgcagttcaatggttagagtcaggaatatttttatggttaggtgcgtctctattaataacttttggcatattattttctttgttaaatgatattcaaaaaacaagtgctttagctaatatcgtaacaattggtttagcagtattaggtggattgtggtttccgataaacacatttccaaattggcttcaacatgttgctcatgttttaccgagctatcatttgcgtaaactaggtgtagatattgcttcaaatcatcatatcaatttaatatcatttgctataatactcttgtatgctttagggagtataatagcagtatattgtattagtcattttaaaagggcggaataaaatatgaaatttttaaaagatacttcaattgctgaaatatcgtctatactttatctgatttttcctattgccggtatattttttaatgaagtatatggtcccaaatggttgtatattatatcagtcattgtcttttcgttgtcgtatcttatattagttatagtaaataatagacttaatacattaatgttttacattttgttgattattcattattttattatttgttattttgttttcagtgtacatccaatgctaagtttgtttttcttttatagtgcttttgccgttccatttacttttaaaaataatgttaaaaaaacggcaactaatcttttcatactaacaatgattatatgtacaataataacgtacttattgtataacaactattttgttgcaatgatggtttattatgtcgttatatcgttaataatgctagataattttaaaaaaatgaaaaaccgtgaatatcaaaaagaaatagcagaaaaaaatagacatattaatacattaattgctgaacaagagcgacatagaattggtcaagacttacatgatacgttagggcatgtgtttgcaagtttatcattaaaatcagaattagcttataaactaatagatgctgatgtagaaaaagtaaaagctgaattattagcaattaataaattatctcgtgaatcattgaacaaagttcgagaaattattgatgatgtaaaattaccatcatttattgaagagattgatagtatacgtaaagttttaaaagatgctgatattgattttacatttgaaaataaagaattagcgcaagtattaagtcctactaaacaatctatgttagttatgattacgcgtgaagcgataaataatgttattaaacatgcaaatgcttcaaaagttcatggtaaattaaaaactgtaaacaatcataaattactgcttatgattgaagatgatggcaaaggtatcgatagtgattgtgaggtgaaaagtatttcacagcgtgtacaacatttaaatggaactttagcagtcgactcaacaaatggaactaaaataatcattgaaatctcaacaggaggaatagcatgacatctttaattattgcagaagatcaaaatatgttacgacaggcaatggttcaattaattaaactacatggtgattttgaaattttagcagatactgataatggtctcgatgcaatgaaacttattgaagaatataatcctaacgttgttattttagatatagaaatgccaggcatgactggacttgaagttttagcggaaattagaaaaaagcatttgaatattaaagtgattattgtaacaacttttaaaagaccgggatactttgaaaaagcagttgtgaatgatgtggatgcatatgttttaaaagaacgttctatagaagaattggtggaaaccattaataaagtaaataacggagagaaagaatatagcgccacattgatgacttcattttttgtagataaaaacccattaacgcccaaagaacaaattgtattaagggaaattggcaatggtttaagtagtaaagaaataagtgaaaaattatttttgacagatggaacagttagaaattatacatctgttataattgataaattatttgcagataatcgttttgatgcttggaaaaaggcaaatgaaaaaggctggatctaaatacaaacaaaaaagtattgagtgttttgatttaagagacttggaaagtgagtcaataatcaaaatcttactcaatacttttattttggtactcgcaatttagatttgttaactaattttttcgcttattataaaacgaaacaatcaagtaaacgataaagcctacaaagatacccaataaaatagatagtactgccgtcactattaatggtaatttgaaaaatatttgtaggaaaataccaatgataattgcgataattactgcaattaatgtgactgtattttcatttgaaatgttcatttattttcactccttaacaataacattatatcatgctatagctttccaaaatattgaaatatgtagatatggctattgacgatatttcttaacttttatatgattaatcggaatgaaaaaagagaagtaggtggcaatatgaagtcaaataaatcgcttgctatgattgtggtagccatcattattgtaggtgtattagcatttcaatttatgaatcatacgggtcctttcaaaaaggggacgaatcatgaaactgtacaagatttaaatggtaaagataaagtacatgttcaaagagttgtggatggtgatacatttattgcaaatcaaaatggtaaagaaattaaagttaggcttataggggttgatacgccagaaacggtgaaaccgaatacgcctgtacaaccatttggcaaagaagcatcaaattatagtaagaagacattaacaaatcaagatgtttatttagaatatgataaagaaaaacaagatcgctatggtagaacattggcgtatgtatggataagtaaagatcgtatgtacaataaggaattagtggaaaagggacttgctagagagaagtatttttcaccaaatggcaaatatagaaatgtatttatagaagcacaaaataaagctaaacaacagaaattaaatatttggagtaaataattaaataggtgattatatatattaaagtaaaatatacttgaagcatcgatttattattaccataaatttatatatagaaataatttaaaggcataataaccatagtgcgtatcgagcgtaatggattattatgcctttgattttacttgaatatagctgtgatttgatcaacctgttctttatttaaagggtgtttagatagctctatggcttcgctaataatacgtcgtaacgaagattttgttgaaactgtatcaacatatttatctctttcttcagaaccttgaatgatattaactgtaccatcactaaagtaaataacaccggtactttggactttaaagttaaagttttgttcaatatgatcctttaatgctttcgcattatttgctgctaattgatacggatcataatcataaaaatcataaataacacgatttggttgaactgtttctgtaaaagtatagatagactttcttgatgaattaaactgatcatgatattgctggctaatgtaatgaccgacaactttttcaatattactattgcttatttctgtatcatgctcatcaggtacatcaaagtgataaaatgttttttcaccccagctttttacatcaacgtttattaaaccgatatctgaaacaatgataaaatcaaatgaacgtgcatactcgaaaaacggatgtttagtagctaaattgcttgtaacgataatatcgtaatattttaatttaccattttcgagatagctatctaaaatcttgcgtaattctcttttagcatttttgtatgcatggtggccaacatcattattagaactcagcatttgacttcttaattcagcattttctgcacttaatgctttgttctttttaataagttgctttcttgcataaacttcggtatctattttactattactatacctttgatttaaaactaatataccaattaatgctacaatgataatgataagtacaacataaaaagacattttttcaccaatcctttttgacttctttaactttgtatacaataataattaataaagattaattgttattcaatttcccacatttttattagttgattttagttcatcattgttataatcaaattataaactgacagatattgatgttcaatgaatatgacgtgaaagattcgtgaattcaagtttatgtcgaatttatgttataacggtcatttaaatgacagaattaggtcactcatagtattttgaagattgaattcattaattttaaaatgtataatgatatttgtgaaagcgcttgcttaggaggtgtatttgagagtgaatgaaatgaatgctaaagaacaattagtggacaatttaatgaaaacatcatcgcaattatttaaatttcacggtgaagttgccatgcagcttttcttaaatgatgaattaaaattaccttctattgttgaaatatgcgtggaacgtaagcgtttaagtgatattgtgaaagttattccgcaatcatatgcgttactatacatagataagcaagatcaagcaatagctaaagaagatttatcactttcaaaaattgcaaaagtttatgtgcaatatgatgatacaacaataatgagtattttcgtttatgatgtagtaaacgatgaatggatttttagattggatccgaatatacgtatacctaagagtaacatatacttccatagtttaaattgggatgtggattatattaaaccggagatcgttctaatgtatgatctaatgcaacaccatcagtatcatcattattccaattataaacgagtcatagatgcattaagctactatcaattttttattttaaaatttgtagtaggtgagcaacgtattaaggatgcaatccagagaacaataaataattaagaaaaagcaattcataacgcagttgaatacatgtgttacgaattgcttttatattagtttttatcacacaagttttttaatgcaaccccgtgatagcaaaactcatatgtagataatacagctttttcagcatcatctacatgaattccaaacatcatcgagatttccgaagcaccttggttaatcatttttaagttaatttttgattcagctaaggcatgtgtaattttatttgcagtaccgatgactttattcataccttcgccgacaatcattaatattgctaaatcatgctcaatacttagctcatcaacatcacatttttgacgaatttcatttaatacttttgtttctttattttgaatttgttttgaacgcataacgatactgatagtatcaatacctgaaggcatatgatcaaatgaaatattattatcctctaagacacctaatatctttctagtaaagccgacttgtctattcattaaatactttttgatattaataacggtaaaatctttatcacaacttataccgctaatcacatttttcgcatttatttctctatcatgcactataaatgtacccttatcttgagggcggttcgtatttttaatcaccacagggatgcgatctttataaagtggttgtaaggcttcatcatggaaaacactaaaaccagcataagataattcacgcatttctcgataagtgatttcttcgattaattcaggatctttgatgatatttggattagctttataaataccagacacatcggtgaaattttcataaattgtggctctaacaccacttgatatgatggcgccagttatatctgatccgccacgtggaaatgtaactatatatccttcatgagatacgccaaaaaatcctgggataattagtttttcatcataatctcttaattttttaatttcagagtaagcactatctaatatttgtgcttcttgtgggacgtcagtaacaaaaatacccgcttccttcggtgatatatattttgttggtataccttgactattattatataaagctatcaattgcgcattaaaatcttcaccacaagaaagtaatgcatctaatagtctctttggttcattttttaattgatttatataatgttccaaagtcacatctatcgtccgtaaaatactttcatccatttgcaattcttttacaatatcatcataacgctgaataatttctctttttttatcatgataatcaagatgattaatgaccttttcatataatctgattaacaaatcagttgttttaatatcattatcatgtcttttacctggagcagaaacgataacaatctttcgctctggatcagaattaacaatatttaaaacctttttaatttgagtagcattggagacggagctaccaccgaatttggaaactttcatagtgcatgccaacctttctaaaaaatcagaaaattgtattcagttttgtaagtaagaatgatattatgtatttatattttgaatattacgaactttacaaaaataaagaataattctatactatactatcatctagtgtttttcaataatacatttgtttttctcaaaagcacaaacggaggtacataaaatgaaaaaattaaatatagcattattaggattaggtactgtcggatctggtgttgttaaaatcatcgaagagaaccgacagcaaattcaagatacattaaataaagatattgtcataaagcatattcttgttcgagataaatctaaaaagagaccgctaaatattagccaatatcatttaactgaagatgttaatgaaattttaaatgatgattcattagatattatcgttgaagtcatgggaggaattgaaccaactgtagattggttaagaacagcacttaaaaataaaaaacatgttattaccgcaaataaagatttattagcagtacatcttaaacttttagaagatttagcagaagaaaatggtgtagctttaaagtttgaagcgagtgtagcaggtggtattccgatcgtaaatgccataaataatggtttgaatgcgaataatatttcaaaatttatgggaattttaaatggtacctctaattttattttatctaaaatgactaaagagcaaacgacatttgaggaagcacttgatgaagcgaaaagacttggttttgctgaagcggatccaactgatgatgtagaaggggtagatgcagcgcgtaaagttgtcattacatcatatttatcatttaaccaagtcattaaattaaacgacgttaaacgaagaggaattagtggcgtaactttaactgatattaatgtagccgatcaactggggtataaaattaaattgattggtaagggaatatatgaaaatggcaaagttaatgcatcggtagaaccaacgttaattgataaaaagcatcaattagcagctgtagaggatgaatataacgcgatttatgttattggtgatgccgttggtgacacgatgttttatggaaaaggagcaggcagtttagcaacaggtagtgccgttgtcagtgatttattgaatgtagcattattctttgaatcagatttacacacattgccaccacattttgaattaaagacagataaaacacgggaaatgatggattcagatgcagaaattaatattaaagaaaaatccaatttctttgtagtagtgaatcatgtcaaaggttcaattgaaaattttgaaaatgagttaaaggcaatattaccatttcaccgatcattaagagttgcaaattacgataatcaatcatatgccgctgttatagttggattggaatcatcaccggaagaattaatcactaagcatggatacgaagttgacaaagtatacccagtagaaggagtttaattataatgagaagatggcaaggattagtagaagagtttaaagcacatttaccagtaaatgaaaatacaccaaaattaacattgaacgagggaaatacaccactcattcattgtgaaaatatgtctaaaatactaggcatagatttatatgtgaagtatgaaggtgccaatccgacaggttcatttaaagatcgcggtatggtaatggctgtgacaaaagcaaaagagcaaggtaagaaaattgtaatatgcgcttcgactggaaatacatcagcgtctgcagcagcatatgcagcgagagcaggtttaaaagctatcgtcgtaataccagaaggtaaaattgcattaggtaaattgtcgcaagcagtaatgtatggtgcagaaatcgtttctattgaaggaaactttgatgaagctttagaaattgtaaaagaaattgcaaaaagtggcgaaatcgagcttgtaaactctgtcaatccatttagaatcgaaggacaaaagacaggctcatttgaaattgtacaacaattagacggtgaagcacctgatattttagcgattcctgtaggtaatgcaggtaatattactgcatattggaaaggctttaaagaatatcatgaagctaaaggatcacaattgccgaaaatgtttggcttccaagctgaaggcgcatcaccaattgttcaaaataaagtcattaaaaatcctgaaacgattgcaactgctattcgaattggtaatcctgctagttgggataaggcgactaatgctcttaaagaatcaaatggattaatagatagtgttactgatgatgaaattctagaagcatatcagttaatgacaactaaagaaggtgtctttagtgaaccagcgagtaatgcttctattgcaggtttaattaaattgcatagacaaggtaaattacctcaaggtaaaaaagtagttgctattttaactggtaatggattaaaagatcctgatactgctatttcactactagataatccgataaagccattgccaaatgataaagatagcattatcgattatattaaaggagctttataacatgtcgaatgttttggagttaacaattcctgcatcaacagccaaccttggagttggctttgattctataggtatggctttagataaatttttgcatctgtctgtaaaggaaacatcagggacaaaatgggaatatattttccatgatgatgcatctaagcaattgcctactgacgaaacaaactttatttatcatgtagcacaacaagttgcttctaaatatagtgttgacttgcctaatttatgtatcgaaatgagaagtgatattccattggcaagagggttaggttcgtcagcttctgctttagtaggagctatatatatcgcaaattattttggtgatatccaactgtctaaacatgaggtattacaattagcgactgaaatcgaaggacatcctgataatgttgcgccgaccatttatggtggtttaatcgctggatattataatgatgtctcgaaagaaacgtcagttgcacatatcgacataccagacgtggatgtgattgtaacgataccaacttatgaactaaaaacagaagcatcaagacgtgctttaccacaaaaattaacacatagtgaagcggttaaaagtagtgcaattagtaatacaatgatttgtgcattagcacagcacaattatgaattagcaggtaaactcatgcaacaagatggctttcatgaaccgtatcgtcagcatttaattgctgaatttgatgaagtgaaaacaattgctagtcaacataatgcctatgcaactgtaattagtggtgctggaccaactattttaatatttagtcgtaaagaaaatagtggggaattggttcgctctttaaatagtcaggtagtatcatgccattctgaattggtcgatattaatatcagtggtgttaaagaacgaattgtataccaatagacgctttatattgtaaaatagtattaaatgcagaatagagaggagatttaatgcgatatgacaaattataaagttgtcgttttagatatggatgacacattgctaaattcagataatgtgatatcagaagaaactgcaaattatttaacagcaattcaagatgaaggttattatgttgttctagcatctggtagacctactgaaggtatgattccaactgctagagatttaaaattacctgaacatcatagctatattattagttataacggtagtaaaacgattaacatgactaatgaagaagtagaagtaagtaaatcgattggtaagcaagatttcgatgaaattgtagattattgtcgagatagaggctttttcgttcttacatatcatgatggtcaaattatttacgacagcgaacatgagtatatgaatattgaagcagaattaacaggtttaccgatgaaacgtgttgatgatatcaaagcgtatattcaaggcgatgtacccaaggtcatgggtgtagattatgtagcgaatattacagaagctagaattgatttgaatggtgtgttcaatgataatgtagatgctacgacaagtaagccattcttcttagaatttatggccaaagacgtttcaaaaggtaatgcaattaaagcgttatgtcacaaattgggatattcggtggatcaagtcattgcttttggtgatagtatgaatgataaatcaatgtttgaagtcgcaggtctagctattgctatggggaatgcatcagatgaacttaagcaatatgcaaatgaagttacgttggatcataatgaaaatggtattccacatgcgctcaaaaaattgttataaattttaaaataagccttaacacatgatatttgaataagatatcttgtggttaaggctttttatttttgtgaaaatgacttcagttatactatggaggatttgaaatacatattttagattagtaatgatatcaaacgaatagagtaaatgtatattttttgaataaatcaagtattaactagtcacggaaggtagataaataaatttgatcattctgaataataacgaatgcattaaaaaatgcagtgacaatctaacattaattgttaaaatcactgcaagcatcttgattttatttagctgtttgtgtccagtcatgcttacctctgaaacgttttacatgagcatatatttggtcagcagtataatctaaatttgtataaactgtaatactgaacgctgattggttttcagcaaatgattcttcggaaaataattcctttaagtgcataaataaatcattcatttgtttatggtttaaaccgggatattcccttaaagttctctttaataattgtccgttcttttcttctaatgcttgaactacaataacaaatctttcatcttgctttagtacatcatcaaataaatttgtttgtccaatcattgaatttcacccctgaaaagttattgttatctatattatacacgatatgcaaaatatctaaaataaagaatggtaacatggtaataataaaatataaacagaatactagttaatacactttatactagaaaaagatattaaagtatatctgctttacaccattaaaaagcggcaaatgctatagataatctaaagcatctgccgtatgagaatttatttatttttgattgtcataatcgtgtggttttaaattaattgtttctagctttacaaattttgttttgtgaatgattttatgaataaagtaaatcaacgctagaatgattaaaggtaaaaagtttttaaaagcatttaaccattgatcttttaaaatatattcaactgagccaccaaatagcaagaataatagtgtagtgatgacaatgattggtcctaatggataaaaaggtgctttatatggtaggaccttattagggtcttgaccttgttttttaatagcttgtcgcaatcgtatttgtgaccaaatgcttgatccccaaacaactataatcattgaaccaataatttcaagtaaattaaaaacggcatttgaattaaagtttgcataaataataacaataacaacgactgcataagtagttaataatgctcttaaaggtaacttagttgtcttgtttaatttacttaaaaattggggtgcttttttgtctgaacttaaggaatacaacattctgcctgttgtataaacacctgaatttgcagcggataataatgaagttaaaataaccgcgttgattactgatgctgcaaaggctatgcctactctatcgaatacaattgtaaatgggctttgacttattgaactacttgctcttaataatgatggatctgtgtacggaataattgcaccaattactgcaattgataagacatagaataaaagaatacgccaaaatacttgtttaattgccttaggcatagactttttagggtcatctgattcaccagcagttactgctactacttctgtaccaccaaccgaaaatccggcgactaataatacgcctaagaaaccagagataccaccaacaaacggtgcttggccttttgtatagttttcaaatccatatgtatgaccacctaagataccgaaaatcattaaaaagccaaaaataacgaatacgataattgttaacactttaatcaatgataaccaaaactcagtttctccaaatgattttacagaaaaaatgtttaataatagtaaaattgtaataaagattaagctccaagtaatggggtggaaaaatttaaatgtgtcccagaaataaagcacatttgacgctactatgacatcaacacttgtaactaatgaccacaatgcccaatacaaccatcccatggtaaagccaagagatgagtcaataaagcgtgttgaataagagctgaatgaacctgatactggataaaatgttgccaactctccaattgatgacattaagaaatatagcatgacaccaataacaagataagcgagtatagcgcctccaggaccagcttgagaaatgatattaccagtagctacaaatagaccagtcccaattgcaccacctatagcaatcatggaaatgtgtcttgagttaagactacggttcattttattatcttccatatttagtctcccatctatttaaatatacccattattgtaagctttttaagtgtactattcaataactatttagtactgtaaagcgaaaaaattaaaattttctgattttttaatcatcttgagcatgtttaattgtaattttgatggggttaaattataatatgtattaaattataattattataaattgtggagggatgactatgtcacaacaagacaaaaagttaactggtgtttttgggcatccagtatcagaccgagaaaatagtatgacagcagggcctaggggacctcttttaatgcaagatatttactttttagagcaaatgtctcaatttgatagagaagtaataccagaacgtcgaatgcatgccaaaggttctggtgcatttgggacatttactgtaactaaagatataacaaaatatacgaatgctaaaatattctctgaaataggtaagcaaaccgaaatgtttgcccgtttctctactgtagcaggagaacgtggtgctgctgatgcggagcgtgacattcgaggatttgcgttaaagttctacactgaagaagggaactgggatttagtagggaataacacaccagtattcttctttagagatccaaagttatttgttagtttaaatcgtgcggtgaaacgagatcctagaacaaatatgagagatgcacaaaataactgggatttctggacgggtcttccagaagcattgcaccaagtaacgatcttaatgtcagatagagggattcctaaagatttacgtcatatgcatgggttcggttctcacacatactctatgtataatgattctggtgaacgtgtttgggttaaattccattttagaacgcaacaaggtattgaaaacttaactgatgaagaagctgctgaaattatagctacagatcgtgattcatctcaacgcgatttattcgaagccattgaaaaaggtgattatccaaaatggacaatgtatattcaagtaatgactgaggaacaagctaaaaaccataaagataatccatttgatttaacaaaagtatggtatcacgatgagtatcctctaattgaagttggagagtttgaattaaatagaaatccagataattactttatggatgttgaacaagctgcgtttgcaccaactaatattattccaggattagatttttctccagacaaaatgctgcaagggcgtttattctcatatggcgatgcgcaaagatatcgattaggagttaatcattggcagattcctgtaaaccaacctaaaggtgttggtattgaaaatatttgtccttttagtagagatggtcaaatgcgcgtagttgacaataaccaaggtggaggaacacattattatccaaataaccatggtaaatttgattctcaacctgaatataaaaagccaccattcccaactgatggatacggctatgaatataatcaacgtcaagatgatgataattattttgaacaaccaggtaaattgtttagattacaatcagaggacgctaaagaaagaatttttacaaatacagcaaatgcaatggaaggcgtaacggatgatgttaaacgacgtcatattcgtcattgttacaaagctgacccagaatatggtaaaggtgttgcaaaagcattaggtattgatataaattctattgatcttgaaactgaaaatgatgaaacatacgaaaactttgaaaaataaatttgatatgtagtttctatattgcgtagttgagcagtttatgatatcataataaatcgtaaagattcctaacaagagagggtgtttaacgtgcgcgtaaacgtaacattagcatgcacagaatgtggcgatcgtaactatatcactactaaaaataaacgtaataatcctgagcgtattgaaatgaaaaaatattgcccaagattaaacaaatatacgttacatcgtgaaactaagtaattcttatcattcaaatacgacgatttgaaaataaagcgggcttacctattatattggggagctcgcttttttatgaaatttttgtgaagagtgattaatggattgagtttcatcggtagaacaatatatgattatattagttgttactttattaaaatttgagaatatttatagaaggaaatagattactgattttataaagtcactttgttagcgaatgcttgaaagagtatttaatatagtagaatttaaaatttcaaagcggaatttaataagtacgaagtagttctgggtatgttttataaatgttcgataatacactttaatcttaaatatgatggtttagaaaatgatttaacaaagaaatgaaactttactgttgaattatgtgaggattgtgttattatataaatcgtaataattacgatttgataaaaagtgaggtaactatatatggctaagaaatctaaaatagcaaaagagagaaaaagagaagagttagtaaataaatattacgaattacgtaaagagttaaaagcaaaaggtgattacgaagcgttaagaaaattaccaagagattcatcacctacacgtttaactagaagatgtaaagtaactggaagacctagaggtgtattacgtaaatttgaaatgtctcgtattgcgtttagagaacatgcgcacaaaggacaaattccaggtgttaaaaaatcaagttggtaaaatcaaatttcgtactttagcccatttacaatatcaataaaacaatgtacagtatatacgaatgctataaactgaatgttttctcatattaataaggaaacattcggtttttaatttgcatttaaaaataattagtttttaaaggggctatttaaagtgaaaatatttgattacgaagatattcaattaatacctaataaatgcatagttgaaagtaggtctgaatgtgatacaactatccaatttggtccgaaaaaattcaagctacctgtagttcctgcaaatatgcaaacagttatgaatgagaaattagcgaaatggtttgctgaaaatgattacttttatatcatgcatcgttttgatgaagaagcaagaataccttttataaaacatatgcaaaattcaggcttatttgcatctatttcagttggtgtaaagaaagcggaatttgattttattgaaaagttagctcaagaaaaattaatccccgaatatattacaatagatattgcgcatggtcactcagattcagtgataaacatgattaaacatataaaaacccatatacctgatagttttgttattgctggtaatgttggtacgccagaaggtgttagagaattagaaaatgctggtgctgatgctaccaaagtcggtataggtcctggtagagtttgtattacaaagattaaaacaggttttggtactggtggttggcagttagcggcattaaacatatgtagtaaagcagctcgtaaacctttgattgccgatggtggtataagaacgcatggcgacattgctaaatcaattagatttggtgcatcaatggtcatgattggttcattatttgcggcacacgaagaatcacctggtgaaactgtagaacttgatggtaaacagtataaagaatattttggtagtgcatctgaatttcaaaaaggcgaacataaaaatgtagaaggtaaaaaaatgtttgtagaacataagggttcattaatggataccttaaaagaaatgcaacaagatttacaaagctcaatttcatatgccggtggaaaagacttgaaatcattacgtactgtagattatgttattgttagaaactctattttcaacggtgatagagattaatatttatagtaggtgatgtaaattaaaaaattcatagtaactgttgttgcgtttttatcaattattatcattgcgccaataacagaatttaaaccattcattcatttacaaaatgaagtaagacaatatattgacattcacatcaataaagaaacaatttctgcggaaaataaattggatacaccgaagaaacaacaatttgcctttaataatatacaaatgaacatgtcgaaatcagatgttgagaaaacattaaataaaccaaaaagagtgacatttaatgaatatggtacgaagtggtatacgtattatgatgacgattacaataattttataatgataagttacatgaaagataaagttaatgcgttatatacaaatcaaaatataatcacttcaaaatcaaaaattaaatacaatacacctaaatcggttgtaaggcaaagattaggcgaaccagaaacagagattgttaaaggtagagtgcgttacgaacaaaataataaagaatatgatgttttccataaaaatcacatttatacgacggtattttatgataagcatcgacgtaataatgtaacagctgttttacaagtaagtgatgctatggaaaatagattaaaagaacaatatggagcaccatcgaaatcgcttgcagatagttttgaactacaaaattttgatttagttaatgctgaaagaaaacaacatcaattatctacattgaagtattctaaacagaattctgaaactgcacgtaagcatagtaaagatatggccaacaatcattattttgatcatacaaatttaaaaggtcaatcaccatttgatcgattgaaaaaagatggtattacatttaactcagccggagagaatttagcatatggtcaagttagtagtatctatgcacatcaaggattaatgaattctattggtcacagaaaaaatattttaaatgatacgtttaaaatattaggtgttggtgttgattttaatgatgaaaaacaacctttttggacagaaaattatactggttaatgtttttggcatgagattaaagggtaatgtttgtctgtaaggaagtagataaacatgatgacaacagataaaccaaaagatgcggatatacttgaacgcgtcaaagatatacttaataaaaaagaaagaaaaaaataataatggctcgctcctgtaaattattacgggggcgagttttaatttgtgtaacattttgcagaaatctgtaattcaaaatttatattaaagaatgagattatctaacaattcgcaatttctgtttgaactgaatttagattagaataaataaaacctcttgaaaacgtaactttttcaagaggtccaaaatttataaaaatgagggcttaacaattacgataatatataacggtttaaaatattacatttcgcggtacaaaccaattactttcccaattacagcaacattgtctaggtaaattggctccattgtactattttcaggttgtaatcgataacgatttttttctttatagaagcgtttgacagttgcttcatcttcctcagtcatagcaacaataatgtctccattttctgctatggtttgactgcgaacaattactttgtctccgtctaatataccagcctcaatcatactgtcgcctacgacgtttaatatgaatatgtcgctattgtgtgtcgatgttaagtgttcaggtaatggaaaatattcttcaatattttctactgcggtaataggaacacctgctgtgactttaccaataactggcacatgaatcgtttcttccatattaatattatcatttgtttgatcacttacaatttctatagcacgtggtttcgttggatctcttcttatatagcctttttcttcaagacgtgaaaggtgaccatgaacagttgaactggatgctaagccaactgcttcaccaatttcgcgaacactaggcggataacctttcgtttgaacaacttgtttaatatagttatatatttcgctttgtcgttttgttaattctctcatatataggcactccctaaattaatttaaatacagtatatcattaatttgaaaccaaaacaaacatttgttcgttaaaatattgacacagaacataagttctgataaattactaatacaaacaaatgttctaggagtgaaaatgatgttttacaataaatataaaaacgtatcaacatatatcatcatatttttagtttcaagtgcagcctttgcaatattcttgttaagtgcgaacattagtgctcactcggaacaagtgtacgaaatgactgaccatcaaattaagaacaatacgataaataaagcatacgaacataaagaccctacaaacaatagcgaacaaagagatgggaaagtgttcgctttaataaattgatacattgtcacaacgttattttgcctatttttgcgaaatagcgttttttattacttttttgctgatcttaaatttgttatattttgttaaagtattataatgattgaataaacaaattgaaggtaggttttttaattgagtaattctgatttgaatatcgaaagaattaacgagttagctaaaaagaaaaaagaagtaggattaactcaagaagaagcaaaggagcaaacagccttaagaaaagcttatcttgagagttttagaaaagggtttaaacaacaaattgaaaatactaaagtaattgatccagaaggtaatgatgtaacacctgaaaaaattaaagagatacaacaaaaaagagataataaaaattaaatcacaaatctgtaaagaattttctgacattataacttgaaataagtattttacttatctttttattttaaaataagttataatgtatttgataaaattgaagaagggaagatacacaagatgtttaatgaaaaagatcaattagctgttgatacgctacgtgcactaagtatcgacacaatcgaaaaagcgaattctggtcatccaggattacctatgggagctgccccaatggcttacactttgtggacacgtcatctgaattttaatccacaatctaaagattacttcaatagagaccgtttcgtattatctgcagggcatggttcagcattattgtatagcttgttacatgtttctggtagtttagaattagaagaattaaagcaatttagacaatggggttctaaaacaccaggtcatcctgaatacagacatacagatggtgtagaagttactaccggaccacttggacaaggttttgctatgtcagtaggattagctttagcagaagatcacctagcagggaaatttaataaagaaggatataatgttgtagatcattacacatatgtattagcttctgacggtgatttaatggaaggtatatcgcatgaagcagcttcatttgctggacataataaattaagtaaattagttgttttatacgattcaaatgatatttcattagatggcgaattaaacaaagctttttctgaaaacacaaaagctcgttttgaagcatatggttggaattacttactagttaaagatggtaatgatttagaagaaattgataaagcgattactacagctaaatctcaagaaggaccaacgattattgaagttaaaacaacaatcggatttggttcaccgaataaagcaggaactaatggtgttcatggggcacctttaggtgaagttgaaagaaaattaacattcgaaaattacggtttagatcctgaaaaacgttttaatgtttcagaagaggtatacgaaattttccaaaatactatgttaaaacgtgctaatgaagatgaatctcaatggaattcattattagaaaaatatgcagaaacatatcctgaattagcagaagaatttaaattagcgattagtggtaaattgcctaaaaattataaggatgaattaccacgttttgaactgggtcataatggtgcatctcgtgctgattctggtactgttattcaagcaatcagtaaaactgtcccttcattctttggtggatcagcagaccttgctggttcaaacaaatccaatgtaaatgatgcaactgattatagttctgaaacacctgaaggtaaaaatgtgtggtttggtgtacgtgaatttgctatgggtgctgctgtaaatggtatggctgcacatggaggtttacatccatatggtgcaacattcttcgtatttagtgattatttaaaaccagcgttacgtttatcatcaattatgggattaaatgcaacgttcatcttcacacatgattcaattgcagtaggtgaagatggtcctactcatgaaccaattgagcaattagctggattaagagccattccaaatatgaatgttatccgtcctgctgatggtaatgaaacaagagtagcatgggaagttgccttagaatctgaatctacacctacttcattagtattgacacgtcaaaacttaccggtattagatgtaccagaagatgtagttgaagaaggcgttcgaaaaggtgcctatacagtttatggctctgaagagacaccagaattcctattattagcttcaggttcagaagttagtcttgcagttgaagctgctaaagatcttgaaaaacaaggtaaatcagtacgtgttgtttcaatgcctaactggaatgcatttgaacaacaatctgaagaatataaagaatcagttattccatcaagcgtaacaaaacgtgttgcgattgaaatggcttcaccgcttggatggcataaatatgtaggtactgcaggtaaagttattgctattgacggctttggcgcaagtgcacctggcgatttagtagttgaaaaatatggatttacaaaagaaaatatcttaaaccaagttatgagcttataagaataatttataaagcgagtatgtttagaagtctaggatgcataatcttaggcttcttttaaagtgttgaaatttagagtatagcacttaaactacatcataagtgataagttatgaaagtatactatttcagattaatctttaaaagctctgttataacagcatgatttttgatattatttttagtatcgatattaaaatacttgaataaactagttcttgaaataatgtgatgaatttagtaaaattcagtaggataaagaaagcgggtgaaacaatggcaacttggttagcaattatttttatagtagctgcattaattttaggtttaattggaggtttccttttagctagaaaatatatgatggactacttgaagaaaaacccaccaatcaacgaagaaatgcttcgtatgatgatgatgcaaatgggtcaaaaaccttctcagaagaaaattaatcaaatgatgacgatgatgaataaaaatatggatcaaaatatgaagagtgcgaaaaagtaaattcgcaattgatagaggctattttccagatatggaaatggcctctttttataatcaaattaataagaataaatatgtttattaaaattaaagttaacaaaatgacgaatagactgagaaatgctataattcattttgtatgatttacagagagtttatttaacgagaaggtgtctgcgtgctctatttaatattttcaatcattgtagctttatttatgggaactatagttatagttattcgtatgaaagctcaaaattatccggtaaatgagaaaaaaatagttttgccaccgttttttatggcgaccggtgcattgatgtacgtcgttccatattttaggctaacaggatcggaaatgctagaagcctttataattggtttgcttttttctacagttctaatttggacttctcgatttgaagtcaaaggtacagaaatttatatgaaacgatctaaagcatttccagttattttgatttcattacttatcattcgtactgtgatgaaaatattcattagtaatgaaatagatcctggagaattaggcggcatgttctttttattagcattctgtatgattgttccttggagagcagcaatgctatataaatacaaaaaactaaagaaaacattaatcaattaattacttttaaaaccacttgtgatcgacttctaaatcagtcaatgagtggttttaattttacttgaaaaggtgaaatgattatattaaaataaaagcgaacaaatgttctatatggaggcagtaatgaaaattatacatacagcagactggcacttagggaaaatattaaatggcaaacagcttttagaagatcaagcgtatattttagatatgttcgtagaaaaaatgaaagaagaagaacctgatatcattgtgatagctggagatttatatgacacaacatatccaagtaaagatgcaatcatgttattagaacaagcgattggaaagttaaatttagaactgcgtataccaataattattattagtggaaatcacgatggtaaagagaggttaaactatggggcgagttggtttgaacataatcagttatttataagaacagattttacatcgattaattcaccaatagagataaatggggttaatttttatacactcccttatgctactgtgagcgaaatgaaacactactttgaagatgacaccattgaaacacatcaacagggaattacgcgctgtattgaaacaatagcaccggaaattgatgaagatgccgtcaatattttaattagtcatctgactgttcaaggtggaaagacatctgattctgaaagaccattaactattggaacggttgaatcagttcagaaaggtgtttttgatatatttgattatgtcatgctaggtcacttgcatcatccatttagtatagaagacgacaaaattaaatatagtggctccttattgcagtattcattttcggaagcgggtcaagctaaagggtatagacgtgtaacaattaatgatggcattattaacgatgtatttattcctcttaagccacttagacaattggaaattatctcaggcgaatataatgatgttattaatgaaaaagttcatgtgaaaaataaagataattatttacattttaaacttaaaaatatgtctcatattactgatccaatgatgagtttaaaacaaatttatcctaatactttagcgctgacgaatgaaacttttaattacaatgaagaaaataatgctatagaaataagtgaaaaagatgacatgtcaattatcgaaatgttttataaacatataactgataaagaattatcggatatccaatctaaaaagataaaaaatattttagaaaacgaattgagaaaggaggattaatgaatgaaaccattacatttaaagttgaataatttcggcccctttttaaaagaagaaattgatttttctaaaattgataataatgaattgtttttaataagtggtaagactggatcgggtaaaacaatgatttttgatgcaatgacttatgccttgtttggtaaagcatcaactgaacaaagagaagaaaatgatttgagaagtcatttcgctgatggtaaacagccgatgtcagtaacatttgaatttcaattaaatcatcgaatttataaagtgcatagacaaggcccttatatcaaagaaggtaatacaacaaaaacgaacgctaaatttgatgtatttgagatggtggatggcaagtatgaaattagagaaagtaaagtaatttcaggtacccaattcattattgaattattaggagtaaatgcagatcaattccgacaattgtttattttgcctcaaggtgaattcaaacgctttttaatatcaaacagtcgtgaaaagcaagggatattaagaacactgtttgacagtgaaaaatttgaagctatacgagaaatattaaaagaagaagtaaaaaaagaaaaagctcaaatcgagaatagatatcaacaaattgaccttttatggcaagaaattgaatcatttgatgatgacaatataaaaggcttattagaggttgccactcaacagatagacaaattgattgaaaatataccacttttacaagctaggtcgaaagaaatactagcatctgtaaatgaaagtaaagaaactgctattaaagaatttgaaataatagaaaagaaaacattagaaaataatatattaaaagataatattaatcaactcaacaaaaataaaattgatttcgttcaattgaacgaacaacaacctgaaatagagggaattgaagctaagttaaagttgttacaagatattacaaacctattgaattatattgaaaatagagaaaaaattgaaactaaaattgctaatagcaaaaaagatatttctaaaaccaataataaaatattgaatcttgattgtgataagcgaaacatagacaaagagaaaaaaatgttagaagaaaatggagatttaattgaaagtaaaatctcttttattgataaaactagagtattatttaacgatattaataagtatcaacaaagttatctcaatattgaacgcttgagaactgagggtgaacaattaggtgatgaattaaatgatctaattaaaggtttagaaacggtcgaagattcaataggtaataaccaaagtgattacgagaaaattatcgaactaaataatacgataacgaacataaataatgaaattaatataattaaagaaaatgaaaaagctaaagctgaattagataaactattaggtagtaagcaagagttagagaatcaaattaatgaagaaacatctatattgaagaatctcgaaataaaattagatcgctacgataaaacaaaattggacttaaatgataaagaaagctttataagtgaaattaaatctgctgtaaatattggagatcaatgtccgatatgtggtaatgaaattcaggatttagggcatcatattgattttgacagtattgctaaacgtcaaaatgaaattaaagaaattgaagcaaatatccacgctataaaatcgaatattgctgtgcataattctgaaattaaatttgttaatgaaaaaatatcgaatattaatattaaaacgcaaagtgatttttcacttgaagtattgaataagcgtctgctagaaaatgaaaatgcattgaataatcaaagagatcttaataaatttatagaacaaatgaaagaagaaaaagataatctaacgttgcaaattcataataaacaattgcgtctaaataaaaatgaatctgagttgaaattatgtcgagatctcatcactgaatttgaaacactctcgaaatataataatatcactaattttgaggtggattataagaagtatgttcaagatgtgaatcagcatcaagaactctcaaaggagattgaagataagttaatgcaattgtctcaaagaaagttaattgagcaaaataatctaaatcattatgaaaatcaactagaaacttacaataatgacttagaattgaatgaacagtctattgaaatggaaatgtcgaggctgaatttaactgatgacaatgatatagatgaaataatagcctggaggggcgagcaagaggaattagagcagaaaagggatacttataaaaaacgttatcatgaatttgaaatggaaatagctaggttagaatcattaactaaggataaagagttattggactctgataaattaaaagatgaatatgagctaaaaaaaggaaagatgaatacactgatagatgaatactctgctgttcattatcaatgtcaaaataatattaataaaacacaatctatagtttcgcatattaattacttaaatcaagaattaaaggatcaacaagaaatatttcaattggctgaaattgtcagtggtaagaataacaaaaatcttacattggaaaactttgtcttaatttactatttagatcaaattattgctcaagcaaatctgagattagcaacaatgtcagataatcgataccaactaattaggcgagaagcggtttctcatggtcttagtggcctagaaattgatgtatttgatttgcattcaaataagtctagacatattagctcgttatcaggtggagaaactttccaatcgtcgcttgcattagctttagggttaagcgaaattgtacagcagcaatcaggaggtatttcactagacatcaatatttattgatgaaggattcggtacattagatcaagaaacgcttgaaacagcgttagacactttattaaatcttaaatcaactggtagaatggttgggattatttcacatgtgagcgaattgaaaaatagaatacctttagttttagaagtgaaatcagatcaatatcagagttcaacaagattcaaaagaaattaaaacataaaaaatagagatggtactttggaatgtatagaacaaccttagcccatctctttttatttaaaaattattttttctcacgtaataaatctctgatttcagttaataacacaacattttcttccacaactgcttcttcttcggcttcttctttcttcattaatgtatttgcaatcttaacaaagatgaataaagcaaacgcgatgataataaagtcgataacagattggataaataaaccgtatttaataccccagaatgaccattctttagcaaaatcaactgatccgaaaattttaccaattaatggcataatgatattttctactaatgaagatataatcttgttgaaagctgcacccatcacaacagcaattgctaaatctaagacgttaccttttaaggcgaactctttgaattcttttaacattacactcaacctctcttttttaaatgtaacctcaattatacaacaaataaaaaaattagaaaatagattattcaagaaaatttgattatcgcaaagacctttgttatcctataaaggtgcgtgagttattgaataaaatgtttagataatatttttattctactacataaaattaaatatagaattgaagggagtaattaattatgaattcttcttcaccagagaatccaaatggaaagaagtattcaccagtcttcatctatagtgcaattgttgttgctatagtcgtattacttggtgcatttttacctgaacaattcaactatgttaccaataatattaaaatgtggattacagaaaagttaggttggtattatcttattcttactacgattatcgtgttcttctgtatattccttatttttagtcctattggaaaacttaaactaggtaaaccaaatgacaaacctgagtttaatacaatttcatggtttgctatgttgtttagtgctggtatggggataggtttggtgttttatggtgcagctgaaccgatggcgcactttgctacgccacctacagcagatcccaaaactactgaagcttatactgaagctctacgttcaacatttttccattggggattccatgcttgggctgtttatggtgttgttgcgttagcgttggcatattcgcaattccgtaaaggtgaaccaggtttattatctagaactttacgtcctcttttaggtgataaagtagaaggtcctattgggatttttattgacgttttatctgtatttgcgacaatcgttggggtagccgtttcgttaggtatgggtgctctacaaattaatggtggtttacattacttgttcaatgttccaaacaatacgtttgtacaagcgattatcatcattgttgttactatcttatttatagcaagtgcatggtctggattaagtaaaggtattcaatacttaagtaacttgaacattggtttaggtactattttaatggtagctgctttaattgttggaccaactgttcttattttaaatatgttaactagctctacgggtagtttactaaacacattcttgtttaatagttttgatacagcagctttaaatcctcaaaaacgtgaatggatgtcttcatggacactttattactggggttggtggttaagttggagtccattcgttggagtgtttattgcacgagtttcaaaaggacgttcaattagagagttcatttctggtgtcttgctagttccagcaattgttagttttgtttggtttagtgtctttggtgtattaggcatcgagacaggtaagaaacacaaagaaatttttgatatgactcctgaaacacagctatttggagtgtttaatcatgtgccatttggcattgttttatcgttgattgcattattattaattgcatcattctttattacatctgctgactcagcaacatttgtattaggaatgcaaacaacatttggttcattaaatccatctagtatggtaaaagttgtttggggaatttcacaggccttaatagcatttgtacttttattagctggtggcggtaacggcgctgaagctttaaatgcgattcaaagtgctgcaattataagtgcattcccattctcctttgtcgtcatactcatgatggtaagtttctacaaggatgcgaaccaggaacgtaaattcctaggtttaacattgactccgaataaacatcgcttacaagaatatatcaagagtcaacaagaagattatgaatctgacattcttgaaaagcgtcagtcacgtagaaatatagagaaaaaagataactaataaagtttagttaagtattttaataacaagtagtatgtcattctagtagctagaacagatatactacttgtttgtttttgtggaaaattgagtatattcaaaaggataagaacgagaatttcgttattaaactacgaattctcgatttttttatattttaagataggtttatttctgaaaacttaatagaaaggggtttgacaaagctaaagtgaagtttgacggtataaacgcaaattaaatatacttttatagaaaattaactcaggctgggacataaatcaatattctatgctctacgaagttatattggcagtagttgactgaacgaaaatgcgcttgtaacaagcttttttcaattctagtcaggggccccaacacagagaatttcgaaaagaaattctacaggcaatgcgagttggggtgagggccccaacacagaagctgacgaaaagtcagcttacaataatgtgcaagttggggatgggccccaacaaagagaaattggattcccaatttctacagacaatgcaagttggggtgggacgacgaaataaattttgcgaaaatatcatttctgtcccactcccatcaaaagaatgacattgaaaaaaatattaaagtttggtgccataattttctttctgctcaatgaaataatacgtttaaaaattgaattgaatcattcgcgaaattgataattattctcaattaataaaaaatacttattacaccttacctgtatgataagttttgcttatatactctgattaaaaagtcaaaacctaaattaagcgttttctaagcatgatgagttgtttatcaataaatataataatacaatttaatcaaggcatataaatataaaaatgtatcaagggggatcattaaatggctgcaaattttaaagagcaatcaaaaaaacattttgacttgaatggccaaagttatacttactatgatttaaaagctgtagaagagcaaggtattactaaagtttccaatttaccttattcaattcgtgttttgttagaatctttacttcgtcaagaagatgattttgtaattacagacgatcatattaaagctttaagtcagtttggaaaagatggaaatgaaggcgaggtaccatttaaaccttctcgtgttattttacaagatttcacaggtgtaccagccgtagttgatttagcttctttacgtaaagcaatggatgacgttgggggagatattactaaaattaatccagaagtaccggtggatttagttattgaccactcagttcaagtggatagctatgcaaatccagaagctcttgaacgtaatatgaaattagaatttgaacgtaactatgaacgttatcagtttttaaattgggcaacgaaagcatttgataattacaatgcagttcctcctgcaactggaatagttcaccaagttaacttagaatatttagcaagtgttgtacatgttcgtgatgtagatggtgaaaaaactgcatttccagatacattagttggtactgattcacatacaacaatgataaatggtattggcgtactaggatggggtgttggtggtattgaagctgaagctggaatgcttggacaaccttcttatttcccaattccagaggttattggtgtacgactagtaaattcattaccacaaggcgcaacagcaactgatttagcgttaagagtaactcaagagctacgtaaaaaaggtgttgttggtaaatttgtggagttctttggtccaggtgtacaacatttaccactagcagaccgtgctacaattgcaaacatggcaccagagtatggagcaacttgcggattcttcccagttgatgatgaatctcttaaatatatgaagttaactggtagatcagacgaacatatcgcgctagtaaaagaatatttgaaacaaaaccatatgttctttgatgttgagaaagaagatcctaattatacagatgttatcgaattggatttatcaacagttgaagcatcgctttcaggaccaaaacgtcctcaagatttaattttcttaagtgatatgaaatcatcatttgaaaattctgtaacagctccagcaggcaaccaaggacacggtttagataaaagtgaatttgataagaaagctgaaattaactttaaagatggatcaaaagctacaatgaaaacaggtgatattgcaatagcagcaattacatcatgtacaaatacatctaacccttatgtaatgttaggtgcaggtttagttgctaaaaaagcagttgaaaaaggcttgaaagttcctgaatacgttaaaacttctctagcaccaggatcaaaagttgttaccggatatttaagagatgctggcttacaaccttatttagatgatttaggcttcaacttggttggttatggatgtacaacttgtatcggtaattcaggtcctttattaccagaaattgaaaaagcgattgctgatgaggacctattagtgacatctgtattatctggtaaccgtaactttgaaggtcgtatccatcctcttgttaaagccaattacctagcttcaccacagttagttgttgcttatgcattagctggaacggttgatattgatttacaaaatgaacctattggtaaaggtaatgacggtgaagatgtatatttgaaagatatttggccatcaattaaagaagtttcagataccgttgatagtgttgtaacacctgaattatttattgaagaatataataacgtatacaataacaacgaattatggaatgagattgatgtaactgatcaacctctatatgactttgatcctaattcaacatacattcaaaatccatcattcttccaaggattatctaaagaaccgggtacgattgttccattaaatggtttacgtgttatgggtaaattcggtgattctgtgacaactgaccacatctctccagcaggtgcaattggtaaagatacgccagctggtaaatatttacaagatcatcaagtgcctattcgtgaatttaattcatatggttcaagacgtggtaatcacgaagtaatggttcgaggtacgtttgctaatatacgtattaaaaaccaattagcgccaggtactgaaggtggttttacaacttattggccaacaaatgaagtaatgcctatctttgatgctgcaatgaaatataaagaagatggtacaggtttagttgtattagctggtaacgattatggtatgggttcatctcgtgactgggcagcaaaaggtacaaacttattaggtgttaaaacagttattgcacaaagttatgaacgtatccatcgttcaaatttagttatgatgggtgtattaccattagagtttaaaaaaggtgaatcagctgattctcttggtctagatggtacagaagaaatttctgttaatattgatgaaaatgttcaaccacatgactacgtcaaagttactgctaagaagcaagatggtgatttggtagaatttgacgctatggttcgttttgactcacttgttgaaatggattactatcgtcacggtggaattttacaaatggttttaagaaataaattagcgcaataaaaaatagatatcacagtaaaattttaatcggtatttgaggcactttgatagtgctcaaaaatacttctataaactttatgatataataggtcggttcaaaacctttgtgttcttggccggcctcttcttgtattttatgttagaatgagatataaagttaaactgaaagaaggcttaaaatgatatatagtattacagaaatagaagcgcgttatgctgaaactgataagatgggtgtaatttatcacgggaattatgcaacttggtttgaagttgcgcggttggattatatatcgaagttaggttttagttatgctgatatggaaaaacaaggaatcatttcacctgtgactgacctcaatgtcaattataaaaagtctattttttatccagaaaaagttaaagttaaaacttgggttgaaaaatattcgagattacgttcagtgtataaatatgagatttttaatgaaaaaggtgaacttgcaactacaggttccacagaattgatttgcattaaagaagatacttttaagcctatacggttggatcgttatttcccagattggcatgaagcttatagtaaagtgcaaacgctcaataatgaagggaaaacagtagagataatggatggtattgattctttataagttactgtaaatgtttggagaggcaatattaacaattaatctataaaaaatagccaatacgttaacattaatgtaattagcgtgaagataagctaatatatagcaaaaacgaacttgttcatacaacatcagatgtgctaaaccaaagtacaacttccgaggttcaggacacatcagaatgtgtaaacaagttcgttttattttagttattttgtggaataagaaatttcatcttcgtgatcaactacatttacaataatgtggtcatcttcaaagtaccacaaatctttttccgctacgacaacatttaaatcgtcatattgttgttcatagccaatatcaacatcttcctttggttcaactgtaaaagcaggactaaatccttgcttgagttggaattcgccaccatatcttacaaaaaacacgagcactttattattttcaggcaactcaagttcatttttaaaccaagttactgctgcatcagtaagttctatttgcataacaatgacctcctatatttattacagaatgggagtgggccaacttgtattatttgtggaatttcttatcgaaattctctgcgttggagcccaccccaacctgctcattattgtaagctgaatttccataagcttctatgttgggacccccgaccagaattgaaaaaacctagttataagcgcattttgttcggttaactacagctaatataacattgtggagcctatgacattgatttatgtctcggtctcaaatgttcttgtaaaaaaactaagtatagttgaattttaagttaaaaaaattgtttttgcaaaaataaaataatccatcaactgcaaaaaaatatgcaatgatggactaatgtcaaaaaattgttacatccattttattttaggttcttcgcctctaaaaatccttgcgatattagagcgatgtctaattatcaatatgattgaaactaagaaactaacgactaataaaatatagtcttgaatgataagcgagccaatcacacagcaaattgctgcaacgatacttgctaaagaaacatatttaaaaatcttcaatacaataaagaagataattgcaagtattagtaaaagtatcggattgactcccaagacgacacctgcactagttgcaacagctttgccaccttggaattttaaataaacaggataaacgtgtccaagtatagcgaataagccaacaattaaaccatttgtaaaaaaagtactaatagggccatctgcgtgaacttgtaaccataaagggaagaaaacagttatgaaccctttgaaaatatctagaaatgttaccaagaatcctgcaggacgacctaatactctaaagctattagtagcgccagtattaccactaccaaattgtctaatatcttttttgaaaaataattttccaattacgaatccacttgggaaagcgccgataagataacttagtagtaacatgacgattatcatcataaatattacacatcctttaatatcttaggactattttatcatattcatttaaattacggctaaaaattttaaaaacggggattaatatatggaattaagctatgaaagttaattgatacttgcattttacgctgatttatataagaataactattgtatagttttaaaaacgaacgtacgtttgcaggaggcgaaatcattggcaatgaataaacaaaataattattcagatgattcaatacaggttttagaggggttagaagcagttcgtaaaagacctggtatgtatattggatcaactgataaacggggattacatcatctagtatatgaaattgtcgataactccgtcgatgaagtattgaatggttacggtaacgaaatagatgtaacaattaataaagatggtagtatttctatagaagataatggacgtggtatgccaacaggtatacataaatcaggtaaaccgacagtcgaagttatctttactgttttacatgcaggaggtaaatttggacaaggcggctataaaacttcaggtggtcttcacggtgttggtgcttcagttgtaaatgcattgagtgaatggcttgaagttgaaatccatcgagatggtaatatatatcatcaaagttttaaaaacggtggttcgccatcttctggtttagtgaaaaaaggtaaaactaagaaaacaggtaccaaagtaacatttaaacctgatgacacaatttttaaagcatctacatcatttaattttgatgttttaagtgaacgactacaagagtctgcgttcttattgaaaaatttaaaaataacgcttaatgatttacgcagtggtaaagagcgtcaagagcattaccattatgaagaaggaatcaaagagtttgttagttatgtcaatgaaggaaaagaagttttgcatgacgtggctacattttcaggtgaagcaaatggtatagaggtagacgtagctttccaatataatgatcaatattcagaaagtattttaagttttgtaaataatgtacgtactaaagatggtggtacacatgaagttggttttaaaacagcaatgacacgtgtatttaatgattatgcacgtcgtattaatgaacttaaaacaaaagataaaaacttagatggtaatgatattcgtgaaggtttaacagctgttgtgtctgttcgtattccagaagaattattgcaatttgaaggacaaacgaaatctaaattgggtacttctgaagctagaagtgctgttgattcagttgttgcagacaaattgccattctatttagaagaaaaaggacaattgtctaaatcacttgtgaaaaaagcgattaaagcacaacaagcaagggaagctgcacgtaaagctcgtgaagatgctcgttcaggtaagaaaaacaagcgtaaagacactttgctatctggtaaattaacacctgcacaaagtaaaaacactgaaaaaaatgaattgtatttagtcgaaggtgattctgcgggaggttcagcaaaacttggacgagaccgcaaattccaagcgatattaccattacgtggtaaggtaattaatacagagaaagcacgtctagaagatatttttaaaaatgaagaaattaatacaattatccacacaatcggggcaggcgttggtactgactttaaaattgaagatagtaattataatcgtgtaattattatgactgatgctgatactgatggtgcgcatattcaagtgctattgttaacattcttcttcaaatatatgaaaccgcttgttcaagcaggtcgtgtatttattgctttacctccactttataaattggaaaaaggtaaaggcaaaacaaagcgagttgaatacgcttggacagacgaagagcttaataaattgcaaaaagaacttggtaaaggcttcacgttacaacgttacaaaggtttgggtgaaatgaaccctgaacaattatgggaaacgacgatgaacccagaaacacgaactttaattcgtgtacaagttgaagatgaagtgcgttcatctaaacgtgtaacaacattaatgggtgacaaagtacaacctagacgtgaatggattgaaaagcatgttgagtttggtatgcaagaggaccaaagtattttagataattctgaagtacaagtgcttgaaaatgatcaatttgatgaggaggaaatctagtgagtgaaataattcaagatttatcacttgaagatgttttaggtgatcgctttggaagatatagtaaatatattattcaagagcgtgcattgccagatgttcgtgatggtttaaaaccagtacaacgtcgtattttatatgcaatgtattcaagtggtaatacacacgataaaaatttccgtaaaagtgcgaaaacagtcggtgatgttattggtcaatatcatccacatggagactcctcagtgtacgaagcaatggtccgtttaagtcaagactggaagttacgacatgtcttaatagaaatgcatggtaataatggtagtatcgataatgatccgccagcggcaatgcgttacactgaagctaagttaagcttactagctgaagagttattacgtgatattaataaagagacagtttctttcattccaaactatgatgatacgacactcgaaccaatggtattgccatcaagatttcctaacttactagtgaatggttctacaggtatatctgcaggttacgcgacagatataccaccacataatttagctgaagtgattcaagcaacacttaaatatattgataatccggatattacagtcaatcaattaatgaaatatattaaaggtcctgattttccaactggtggtattattcaaggtattgatggtattaaaaaagcttatgaatcaggtaaaggtagaattatagttcgttctaaagttgaagaagaaactttacgcaatggacgtaaacagttaattattactgaaattccatatgaagtgaacaaaagtagcttagtaaaacgtatcgatgaattacgtgctgacaaaaaagtcgatggtatcgttgaagtacgtgatgaaactgatagaactggtttacgaatagcaattgaattgaaaaaagatgtgaacagtgaatcaatcaaaaattatctttataaaaactctgatttacagatttcatataatttcaacatggtcgctattagtgatggtcgtccaaaattgatgggtattcgtcaaattatagatagttatttgaatcaccaaattgaggttgttgcaaatagaacgaagtttgaattagataatgcagaaaaacgtatgcatatcgttgaaggtttgattaaagcgttgtcaattttagataaagtaatcgaattgattcgtagctctaaaaacaagcgtgacgctaaagaaaaccttatcgaagtatacgagttcacagaagaacaggctgaagcaattgtaatgttacagttatatcgtttaacaaatactgacatagttgcgcttgaaggtgaacataaagaacttgaagcattaatcaaacaattacgtcatattcttgataaccatgatgcattattgaatgtcataaaagaagaattgaatgaaattaaaaagaaattcaaatctgaacgactgtctttaattgaagcagaaattgaagaaattaaaattgacaaagaagttatggtgcctagtgaagaagttattttaagtatgacacgtcatggatatattaaacgtacttctattcgtagctttaatgctagcggtgttgaagatattggtttaaaagatggtgacagtttacttaaacatcaagaagtaaatacgcaagataccgtactagtatttacaaataaaggtcgttatctatttataccggttcataaattagcagatattcgttggaaagaattgggacaacatgtatcacaaatagttcctatcgaagaagatgaagtggttattaatgtctttaatgaaaaggactttaatacagatgcattttatgtttttgcgactcaaaatggcatgattaagaaaagtacagtgcctctatttaaaacaacgcgttttaataaacctttaattgctactaaagttaaagaaaatgatgatttgattagtgttatgcgctttgaaaaagatcaattaattaccgtcattactaataaaggtatgtcattaacgtataatacaagtgaactatcagataccggattaagggcagctggtgttaaatcaataaatcttaaagctgaagatttcgttgttatgacagaaggtgtttctgaaaatgatactatattgatggccacacaacgcggctcgttaaaacgtattagttttaaaatcttacaagttgctaaaagagcacaacgtggaataactttattaaaagaattaaagaaaaatccacatcgtattgtagctgcacatgtagtgacaggtgaacatagtcaatatacattatattcaaaatcaaatgaagaacatggtttaattaatgatattcataaatctgaacaatatacaaatggctcattcattgtagatacagatgattttggtgaagtaatagacatgtatattagctaaaaactatatgcaatcacgaaattaaatgataaaatacagtaatgttaaattttgactaaattcaagggatttatattaaatgctgaccaagtacttatcgttaaattagcgatatactttgaccaaactaatataaatctcttgtattgtataagaaatgatgatgtatctctatatttactgaaggttcaattcggtctaattttatagaaggtacatgattcatgtagaggatgcgaggggtttattttgaaagatttcgatagtttaatacctggatggtttaaagaatttgtccatgttggtaccgatttaatatggtctcaatatttaattggtctattattgacagctggattcttctttacgattagttctaaattcgttcaattacgaatgttacctgaaatgtttagagctttagtagaacgtccagaaactttagaagatggtaagaagggtatttcgccattccaagcatttgcgattagtgctggttcgagagttggtactggtaatattgctggtgttgcgactgcgattgttttaggcggtccaggtgcagtattttggatgtgggttattgcatttataggtgcagcgagtgcatttatagaagcgactttggctcaggtttataaagtacatgataaagatggtggattccgtggtggtccagcttactatattactaaaggtttaaatcaaaaatggctaggtatcgtatttgcgattttaattacaattacatttgcatttgtatttaacacagtgcaatctaatacaattgcggagtcgttaaatacgcaatataatattagtccagtaatcacaggtattattttagcaatcgtaacagctattattatatttggtggtgtacgtagtattgctacgttatcttcgttaattgtaccgattatggctatcatttacattggtatggttttagtaatattgctatttaatttagatcaaattgttcctatgataggtacgattattaaaagtgcatttggtatcgaacaagtaactggtggcgctgtaggtgctgcggttcttcaaggtatcaaacgtggtttattctctaacgaagctggtatgggttctgcgccgaatgcagcggcaactgctgccgtaccacaccctgttaagcaaggtttaatccaatcattaggtgtgttctttgatacaatgttggtttgtacagcaactgcaatcatgattttactatattcaggactgaaatttggtgataacgcacctcaaggtgttgcagttactcaatcagcacttaatgagcatttaggttctgctggaggtattttcttaacaatagcagttacactgtttgcattttcatctgttgtaggtaattactattacggtcaatctaatattgaatttttatcaacaaaccgtgtaatattatttatctttagatgtcttgttgtagtacttgtctttgtcggtgcagttgtaaaaacagaaacagtatggaatacggcagacttatttatgggcttaatggcaattgtaaacattatttccattataggactgtccaatgtagcttttgcattgatgaaagattatcaaaagcagaaaaaagaaggcaagaaccctgtctttaaacctgaaaacttagaaattaacttatttggaattagtgcttggggcgctaacaaatataagaactctgataaataaatatttttaatgtaacgattcattatataaaaatcaaataaaccctgaggttttcaaattaaagcgaaaatctcagggttttaaatttgtactcaattatcatctgtatcattacactagttaatctaagatttgattatatattaatatagtaaggttgagatttatttcctccattggtgtgcaaagactataccattgataagacatattgttggatagatgaatataaatttgttttagctttgcacaatttaatagtacgttttagtttgtattgagtattaattcagataatatataaataaatagaattatttgtaaatatgggagtcagatttttttattatagttattccactttgagagacatcgaaattaaattaagatatatcatataggataggcgtgtaatagaacacaagtatttaaattattatactttcaagttagacatttccgatatataatcttaataatagaaaaataggtgatgataatgggagaatatattgttactaaaacattgaacaacaatgtcgtagtatgtactaataatgatcaagaagttattttaatcggtaaaggtattggttttaacaaaaaagagggaatggcgttaaacgaccaaactattacaatagagaaaatttataaattagaaagtgagcaacaaaaagcacattataaaagtttagttgaaatcgctgatgataatgtattacaagtaattattgattcgttgaattttatttctaatactgcgatgaatgttgattcaaaacaacttgtagtttcattaacggatcatattatatttgcttataaacgcttaaaacaaaatcaagttattagcaatccatttgttatggaaactatgcagttatatagtgatgcatatcatattgctaaacaggtgattgatcagttaaatgcagcattagatgtacattttcctgaagatgagataggatttattgcattacatattgcatctaatacagaagatttatctatgcatgagatgaccttgatcaataatgttattaaaaaaggtatagatatcattgaatcagaccttgtgacaactgttgataaggaatcattacaataccaacgttttataaggcacgtacaatttttaattcgccgattaagaagaaaagaatatatacatgcacaagatgattttgtgtctatgattaaaaatcactatccgatttgctataacacagcatataaaattttaactatgatacaaaaacaatttgatgttaatatcagtgagtctgaaattatatatttaacattacacattcatcattttgaagaaaggattaatcaatcctaaattaagtgtattacacgggcgtttcgttactgtaaagggtatttgtatggtatcattgatgttagtaattttacataagtggactgtttttatacaacatcttatgaatattttaagtggtggtgaatctataattgaatgaaaatgaaaagaatataagaaagaattttttaaaatttaccgaatcacggtatatgaagtttgttggtgggaatgatttagtcttctcattaatagcgctagtattgttgggtattgttatttttattttcgaaaaagtatcatatgtttttgatccttttatcatcgtttttaagacgatagcagcacctatcatcgtctctttaattctattctatctatttaacccaatcgtaaatatgatggaacgttatagaataccaagagttgcaggtatttctattatttatctagctgtagtaggtgttattacgttaattgttaatttattgatacctattattggttcgcaagtagatagtttagttaaaaattcaccgcaatatctagaaaaattaattaattctattgataaaatagcaaataatacgtttttctcttcgtattatagtcaaattaatgattggttaaattctttacctaagaaaataccatctatgttaagtgaatttacagatggctttgggtctaaaattgcaacgtttgcagaaacgattgctaatattggcgttgtgattgtcacaacaccatttgtactattctttatgcttaaagatggacatcacttcaaagaattttcaacgaatattatgccaccgaaattccgaaaagattttcatgatctacttgaaaaaatgagtgttcaagttggttcatacattcaaggacaaattatcgtttcattctgtatcggtatactgttgtttatcggttattcggttatcgggttgaaatatagcttagtattagctagtattgcggcagttacaagtgttgtaccatatttagggcctactatagcgatttctccagctattgtaatagctgctataacatcgccgtggatgctcttaaaattagcagtagtatggactttagtacaatttgttgaagggcacttcatttcaccaaatatcatgggtaaaacacttaagattcatccacttacaatcattttcattttactgtgtgcaggcaaattgcttggtattgtaggcgttattttaggtattccgggatatgctattttaaaagtattagttactcatttattccaattatttaaacgtcgatacaatcgtttctatggtaatgatgtaggtgaatatgatattaaagaaagtaataaaatagttgaataagtaataaaaaataccaatgactatatgtttgttggtattttttatggtgcttataatgttgggcagttacatttatgattatcagcacatgtttagcttataaatttttacgaaagtttagccgtttataaagcacatgcataatgaaacgagtatttgccacttgattagtacttcattattatgtcgaaaataaaaataagtggtatttttaatatattaagaagcactcataatcggctgttaattaataatatttttcataagtattgattcatcattttctttatgttaaatatgaatcagtatagataaccatattgttctgtttgagatagaaatattttctatttacttcttaatacagatatcaatatgacaaaagtgttatataaatcaaaggtaaatgatatgctatttttatggtttatatgatatattttgatttataacagaaataattagaattgatgtgaaaaaatgaatcaggaagttaaaaacaaaatattttcaatcttaaaaattacgtttgctacagctttatttatttttgtagcaatcacattgtatcgggagttatctggtattaactttaaagatacgttggttgaatttagtaagattaaccgtatgtccttagtgttactatttattggtggtggggcatcgcttgttattctatcaatgtatgatgtgattttatctagagctttaaaaatggatatatccttaggcaaagttttaagagtaagttatatcatcaatgcattgaatgcgattgtaggtttcggtggctttattggtgcaggcgttagagcaatggtttataaaaactatacgcatgataaaaagaaattagttcactttatatccttaatacttatttcaatgttgacaggtttaagcttattatcattgctaattgtattccatgttttcgatgcatctttaatcttagataagattacatgggtaagatgggtattatatgtagtgtcatttttcttaccattattcattatttattcaatggttagaccacccgataaaaacaatcgttttgtaggattgtactgcactttagtgtcgtgtgttgaatggttagcagctgcagttgtattatatttctgtggtgtaattgttgacgctcatgtatcattcatgtcctttattgcaatatttatcattgctgcattatcaggtttagtcagctttattcctggtggtttcggcgctttcgatttagttgtattactaggatttaaaactttaggtgtccctgaggaaaaagtattattaatgctacttctatatcgttttgcgtactattttgtaccggtaattattgcattaattttatcatcatttgaatttggtacatcagctaagaagtacattgagggatctaaatactttattcctgctaaagatgttacgtcatttttaatgtcttatcaaaaggatattattgctaaaattccatcattatcattagcaattttagtattctttacaagtatgatcttttttgtaaataacttaacgattgtttacgatgctttatatgatggaaatcacttaacgtattatattctattggcaattcatactagtgcttgtttattacttttactgaatgtagttggtatttataagcaaagtagacgtgccattatctttgctatgatttcaattttattaatcacagtggcgacattcttcacttacgcttcatatattttaataacatggttagctattatttttgttctgcttattgtagctttccgtagagcacgtaggttgaaacgcccagtaagaatgagaaatatagttgcaatgcttttattcagtttatttattttatatgttaaccatatatttattgctggaacgttatatgcattagatatttatacgattgaaatgcatacatctgtattgcgctattacttctggcttacgattttaatcatcgctatcatcataggtatgattgcatggttgtttgattatcaatttagcaaagtacgtatttcttctaaaattgaagattgcgaggagattattaatcagtacggcggtaattatttgagtcacttgatatatagtggtgacaagcagtttttcactaatgaaaataaaacagcatttttaatgtatcgttataaagcaagttcattagtggttcttggagatccgttaggtgatgaaaatgcctttgatgaattgttagaagcattctataattacgctgagtatttaggctatgatgttatattctatcaagttacagatcaacacatgcctttatatcataatttcggtaaccaatttttcaaattaggtgaagaagcaattattgatttaacgcaattttcaacttcaggtaaaaaacgccgtggatttagagcgactttaaataaattcgatgaacttaatatttcgttcgaaattattgaaccaccgttttcaactgaatttataaatgaacttcaacatgtaagtgatttatggctagataatcgtcaggaaatgcatttctctgttggtgaatttaatgaagaatacttatctaaagcgccaattggtgtaatgcgaaatgaagaaaatgaagtaattgcattttgtagtttaatgccaacatactttaatgatgccatttcagtcgatttaattagatggttgccagagttagatttaccattaatggatggtctatacttgcatatgttactttggagtaaagaacaaggttatacaaaatttaatatgggtatggcaacgttatcgaacgttggtcaattgcattattcatatttaagagaacgacttgcaggccgtgtctttgaacatttcaacggtctatatcgtttccaaggattacgtcgttataaatctaaatataatccgaattgggaaccacgctttttagtttatcgtaaagataattcgctttgggaatcactttctaaagtaatgcgtgtaatacgtcacaaataattaaaatccaagtgctaagaggtatacagttatgcctgatgcgcttggattttttggtttctataaagaatgatttataaaaaacggtacagataagaatatttaagtttcctatctgtaccgtattttaatattgaaatgagctaaagttaagtcgcctaacttttattatcagtccaatcagtttcatcaagtataaatgttattgcttatttttgtattcttggcgtattttttgttcttctgcatagcgctctggatttttcttataaaaatcttggtgatagtcttcggctttgtaaaattgtgacgctggtaatatttttgttgcaattgccttatcagcattaatcgtatttttaagctgctcgatataagtctcagcgagttctttttgatgatcattagtgtagaaaatagctgtttgatattgaggaccacggtcttgatattgaccacctgtatctaatgggtcaatgactgagaaaaatatttctaataacttattgtatgagaataatgcaacatcatattgaatttcaacagtttctaaatgaccactcgtacctgattttacttgttcgtaagtaggattttcaatatgtccgcccatatatccagaagttactttttctatgccgtcaaaggtgtcaaatggtttcgtcatacaccaaaagcaacctccggcaaaataagctgtattaatattcatttttgacatcctttcattagaccttagtacgatttattaagaaatcacttgctttttgaattgtttttatataacgttaatatgtgattattatagtacacaaaaatctatttttgaagatataaggtaggtaaatatggataaagaaactaatgacaacgaatatagacgtcaaagtgaacatcgcacttcggcgcctaagcgaaaaaagaagaagaaaattaggaaattacctatcattcttctgattgttgtaattttacttatcgcattagttgtatatattgtacatagttacaatagcggtgtagaatatgccaagaaacatgcgaaagatgttaaagtacatcaatttaatggaccagtaaaaaatgatggtaaaatttctattcttgtactcggtgcagataaagcacaaggtggacaatcaagaacagattctatcatggttgttcaatatgactttatcaataaaaagatgaaaatgatgtctgtcatgcgtgatatttatgcagatattccaggatatggaaaacacaaaattaattcagcatacgctttaggtggtccagagctacttagaaaaacacttgataaaaatttaggaattaatcctgaatattatgcagtagttgattttactggatttgagaaaatgattgatgaattaatgcctgaaggtgtaccaattaatgtcgaaaaagatatgtcgaaaaatattggtgtatctttgaaaaagggtaaccataggttgaatggtaaagaattacttggttatgcaagattccgtcacgaccctgaaggtgacttcggacgcgtgcgacgtcagcaacaagtgatgcaaacattgaaaaaagaaatggttaattttagaacagttgttaaattaccaaaagttgcaggtattttaagaggctatgtgaatacaaacattcctgattcagggattttccaaacaggtttgagttttggtatccgaggtgaaaaagatgttaagtcattgactgtgccaatcaagaactcatacgaagatgtcaatacaaatactgatggtagtgcattacagattaataaaaacacaaataaacaagctattaaagactttttagatgaagattaaaaataaacaaggcgatttctatcatactcagatagaagtcgccttgttcgttttcaaagaattaattggcatgcatcttatgaagaattattgatctgactttcttacgccagccacaccataatggtttggtttcatttcttctataacaacgtgaattgcttgtctatttgcccccgttgttttttctacggcgtcagttacttcgctaactaaattttttaattgttcatccgaacgaccttctaataattttacattgacgattggcatcatccaaacctcctaatcattattaatttgagtatatcatgtaatacttaaaaattcatttgcaaaataacagaacatttgttctaaaatagttgaaatagaacacgtgttcgtatataataagattcaagtaagggaggaataacagtgtataattatcatttattagaagatagggatgttctatgtattgaccaaaaaagtttttttgcgagtgtttcttgtattgaaaaggggctagatccattagaaacaaagctagctgttgttgcagatactaagcgtcagggttctgtaatattggctgcgacacctaaattaaaagaattaggcatcaagacagggtcgcgattgtttgaaataccacatagaaatgatatttacattatcaatccaagtatgcgtaaatatcttaatgtttcagttgctatttctaagattgcattgcgttatattccacctgaagatttacaccaatatagtattgacgaattttttatggatgttactgatagctatcatagatttagttctacagtacatgcattttgcgaaagacttaaacgtgaaatttatgaagaaacaggcatttattgtactgtgggcattggttctaatatgttattaagtaaaattgctatggatgttgaagcgaagcatagtcaaaatggtatagctgaatggcgatatcaagatgtaccaacgaaattatggccaattcagcccttgcgagatttttggggtattaatcgtcgaacagaagccaaattgaataaaagaggaatttttactataggagatttagcgaaatatccatataaatttttaaaaaaagagttcggtattttaggtgttgatatgcatctacatgcgaatgggatagatcagagtaaagtacgtgaaaagcacaagatcagcaatccatcgatatgcaaaagtcaaatattaatgagagattatcattttgatgaagcaaaagtagtaatgcaagagttaattgaagatgttgctagcagagttcgagcaagaaaaaaagtggcaagaacgatacattttgcctttggctatagtgatgaaggcggtgtacataagcaatatactttgaaagatccaacaaacttagaaaaagatatttataaagtagtaatgcatttcgcagataaattatgtaataaacaagcactatatcgtacgctaagtatatctttgagtcaatttattaatgaggatgagcgacagttaagtctgtttgaagatgaataccaacgcaaacgtgacgaatgtctagctaaaacgatagaccaattacatttgaaatacggcaaaggtattgtgtccaaagcagtatcgtttacagaagcaggtacaaaacacggcagattaggtttaatggctggacataaaatgtaatgactatacggtttaagtaatatataactgtgattcgtataaaataagtctctaaagataaatatttcatatatcacaatagattttcacaataatatctaagaatacatggaatttatcaaaagagacttaataattattggatataacaatcaaaatcactcaatgcttgcataccgcgttctcggtcagtagggtttttgaaactaatttttaaagcaccgtatatatcttcgcgtacttctaagattcttaagttgcttatagatatgttatgtaaactcaggatataagtcactttacttatcatacctgattcatccggaatgtctacatatagatcatacgcagtatttagtccacctagttgtttagcgggtagtgcgtcgcgatacgatttagcttgggcaaaaaatgataacaatttttcagaatcattgctttcaattagtctttctaaatcttgaaactgactttttagctgtcgaatcatttctaaaatatacgttttattactcaaggtgatatctttccacatttgtgcattactactagctatacgagtgatatcacgaaaaccaccagctgcaagtttattaactaaatgatgttcttgaccgttcttttgactaacatgaactaaactagatgcaacgatatgaggtaaatgacttacgacgcttgttacgtagtcgtgttcttcagcagtagttacaataaatttagcaagagtaggtgataacagttcttttaacgtgtttgctgcttgctcatttcttggctcattgtagactaaaatataataagcgttttcaaataagtgctttttagcatttagtacaccagatttatgactaccagccattggatgaccactgactaaatgaatattatgctttaataaattgcattcgtgttgctgtatcattgctttagtactaccagtatcagaaacaataacaccaggtttagttggcatatctataagctcgctaagatatttatttgtgatagcaacaggtgttgcataaataattacatcggcttttttaatagcttcactataatttaaacatttttcattaataatgccgattgatttagctttatctaactgagaaatatctgcatcgtatgcaataatattagtattagggttatggtattttatattgctagcaagacttccaccaattaatccaagcccaacaaataaaactgttgtcatataaatcaccttatttcgaaattttcagaataataacattgtaaatgagctgttgacacagtgcaatagtaaataaaaatcgataatagcattaatagataaacggagataaatcatctacaataaagagtatagtaacacaatggcaacggaggggtaaatcaatggaaccaatattagaaatgattaaaacattaacaggtattaatagtccttcaggagacacagaagaagcaattcaatttgtcgaaaaatatgcaaaagacttgggttatcaaacaacactaacaaataaaggtgcgttattaataacagtgccaggcaaaaatgatgaagtacaacgctgtattactgctcatgttgatactttaggtgcaatggttaaagaaattaaagaagatggtcgcttagcaatagaattaattggaggattcacgtataacgcgattgagggtgaatattgccaaattaaaactgatgctggtcaaatatatacaggaacaatttgtctgcatgaaacaagtgttcatgtatatagaaataatcatgaaatacctagagatcaaaagcatatggaaataagaattgatgaagtaactacatcagaagaagatacaaagagtttaggtatttcagtaggtgattttgttagctttgatccacgtacagttatcacgtcatcaggttttattaaatctcgtcatttagatgataaagctagcgtagcgatgatactacaattactaaagaaattaaaagaagagcaaataatattaccacatacaacgcaattttatatttctaataacgaagaaataggttacggtgcaaatgcatcaattgattcgaaaatcaaagaatatattgcattagatatgggcgcgttgggagacggtcaagcatcggatgaatatacagtttctatttgtgccaaagatgcttcaggtccatatcataagcaattgaaatcgcacctagttaatctttgcaaaataaataacattccatataaagtagacatatatccatattatggttcagatgcttcagcagctttacatgctggtgcggatatcagacatggtttatttggcgctggcattgaatcatctcatgcaatggaacgaacacatattgattctattaaagcgacagagaaattactatatgcatattgcttatcaccaattgagtaaacaattagtgttgacaaatgtgaacgacctatgtaatataatgaactataaaaataattagaattttctaaagaaatagtagcagatatgaaacgtagcaaatagaaagctaatgggtgatgggaattagcacgccatatcttgtgaattggactttggaaaacaattgaatgagttttgaaagtgaacatgaattatgttaactaaggtggcaccacggtaacgcgtccttacaggtatatgcgttatgtggtgtctttttatttagacaaaatgtagtagttaattaaaggtagcaacagaaagttagtggatgatgtgaactaacaccgagattaatgaaattgggttttgtctgcaacagaaaaattatatatagtaaagagtgaactatgaatatttcgaatattcggttaatttaggtggtaccacgcgtcagcgtcctttatattgataaggatgctggcgcttttttgaaaggagcgtatagaatggatatattttataaaaaaataaaagcaaatgtaacgcccgaagttttagcacaacttcattccaagaagatcattttggaaagtacaaatcaacaacaaactaaaggtcgctattcagttgttatttttgatatttatggcactttaactttagataatgatgtattatcagtaagtactttaaaagaatcgtatcaaatcactgaaagaccgtaccattatttaacgactaaaataaatgaagactaccataatattcaagatgagcaacttaagtcattaccatttatatctggatatgttgggacgtgtagctttgatttagtaagacatgaatttcctaaattgcaatcaatacaattagaagatcacaagcagcacgatgtaaggttatatatggttgaacaagtttatgtatttgaccattacaaagatgagttatatatcatcgcgacgaatcaattttcaaattcaacaaaatcagatcttgagaatcgagttattaagtctatcgaagacttaactaaaatccaaccattcatgcctacacaagattttgattttaaaactaaagaaattcaatcaaacatttctgaagaaagatttatcgaaatgattcagtatttcaaagagaaaataacagaaggggatatgttccaagttgtgccatcaagaatttacaaatatgcgcatcatgctagtcagcatttaaatcaactttcgtttcaactgtatcaaaatttaaaacgacaaaacccaagtccatatatgtattatcttaatatcgatcaaccatatattgtcggtagttctcccgaaagtttcgtaagtgtcaaagatcaaattgtaacaactaatcctattgcaggtacgattcaacgtggtgagacgacacaaatagataatgagaatatgaaacaactacttaatgatccaaaagaatgcagcgaacatcgtatgctagttgatttaggacgtaatgatattcatagagtaagtaaaatcggtacctcaaaaattactaaattaatggttattgaaaaatatgaacatgttatgcatatcgtaagtgaagtcacaggtaaaataaatcaaaatttatcgccaatgacagttattgcgaatttattaccaacaggtaccgtttcaggtgcaccaaaattacgtgcaattgaaagaatatatgaacaatatccacataaacggggcgtttatagtggtggtgttggatacataaattgtaatcataacttagattttgcattagcaattcgaacgatgatgatagatgagcagtatatcaacgtagaagctggttgtggcgttgtatatgattctattcctgaaaaagaactgaatgaaacgaaattgaaagctaaaagcttattggaggtgagcccatgatcttagttgtagataattatgattcctttacatataacctagtggatattgttgctcaacatactgacgtcattgttcaataccctgatgatgataatgtgctgaatcaatcggtggacgctgttattatatctcctggtccagggcatccattagacgatcaacagttaatgaaaatcatatcaacctatcaacacaaacccattttaggtatttgtttaggggctcaggcactgacttgttactacggtggagaagtcattaaaggcgacaaggttatgcacggcaaagttgatacactaaaggttatatcgcatcatcaacatctgttatatcaagatataccagaacagttttcaattatgagatatcattcattaataagtaaccctgacaattttccagaagaattgaaaattactggacgtaccaaagattgtatacagtcattcgagcataaagaaagaccgcattatggtattcagtaccatcctgaatcatttgctacagactatggtgtcaaaataattacaaatttcattaatctagtgaaggaaggatgaaaaccatgacattactaacaagaataaaaactgaaactatattacttgaaagcgacattaaagagctaatcgatatacttatttctcctagtattggaactgatattaaatatgaattacttagttcctattcggagcgagaaatccaacaacaagaattaacatatattgtacgtagcttaattaatacaatgtatccacatcaaccatgttatgaaggggctatgtgtgtgtgcggcacaggtggtgacaagtcaaatagtttcaacatttcaacgactgttgcttttgttgtagcaagtgctggcgtaaaagttataaaacatggtaataaaagtattacctcaaattcaggtagtacggatttgttaaatcaaatgaacatacaaacaacaactgttgatgatacacctaaccaattaaatgaaaaagaccttgtattcattggtgcaactgaatcatatccaatcatgaagtatatgcaaccagttagaaaaatgattggaaagcctacaatattaaaccttgtgggtccattaattaatccatatcacttaacgtatcaaatggtaggcgtctttgatcctacaaagttaaagttagttgctaaaacgattaaagatttaggtagaaaacgtgcaatcgttttacatggtgcaaatggtatggatgaagcaacactatctggtgataatttgatatatgaattgactgaagatggagaaatcaaaaattacacattaaatgcgactgattatggtttgaaacatgcgccgaatagtgattttaaaggcggttcacctgaagaaaatttagcaatctcccttaatatcttgaatggtaaagatcagtcaagtcgacgtgatgttgtcttactaaatgcgggtttaagcctttatgttgcagagaaagtggataccatcgcagaaggcatagaacttgcaactacattgattgataatggtgaagcattggaaaaataccatcaaatgagaggtgaataatatgacgattttatcagaaattgttaaatataaacagtcacttttacaaaatggctattatcaagacaaacttaataccttgaaaagtgtgaagattcagaataaaaaatcttttataaacgcaattgagaaagaaccaaagctagcaattattgcagaaattaaatcgaagagtcctacagttaatgacttacctgaacgagatttatcgcaacaaatctcagattatgaccaatatggtgcaaatgccgtgtccattttaactgatgaaaagtactttggtggtagttttgaaagattacaagcattgacgacaaaaacaacattacccgtattatgcaaagactttattatagacccgcttcaaattgatgttgctaaacaagctggtgcatctatgattttattgatcgttaacatcttatctgataaacaattgaaagatttatataactacgctatatcgcaaaatctagaagtgttagttgaagtacatgatcgccatgaattagaacgtgcctataaggttaatgctaaattgattggtgtaaataacagggacttaaaacgatttgttacaaatgtggaacatacaaatactattttagaaaataaaaaaacaaatcattattatatttctgaaagtggtattcacgatgcatctgatgtaagaaaaatcttgcatagtggtatcgatggcttactaataggtgaggcgcttatgcgttgtgacaatctatctgaatttttaccacaactgaaaatgcaaaaggtgaagtcatgatgaaattgaaattttgtggctttacatcaataaaggatgttacagcggccagtcaattacctattgatgcgataggtttcatccattatgaaaaaagtaaaaggcatcaaacaattacccaaataaaaaagttagcgtctgctgttccaaatcatatcgataaagtatgtgtcatggtaaatcctgatttaacaacaattgaacacgtattaagcaatacgtcaattaacacaatacagttacacggcacagaatctattgattttatacaggaaattaaaaagaaatattcaagcattaaaatcactaaagctttagctgcagatgaaaacataatccaaaacataaataaatataaagggttcgtagatttatttattatcgacacaccctcagtgtcgtatggtggtaccggtcaaacatatgactggactattttgaagcacataaaagacataccttatttgatagcaggaggcattaactctgaaaatattcaaacagttaatcaacttaaattatcacatcaaggttatgatcttgcatcaggtatagaagtaaatgggcgaaaagatatagaaaaaatgacagcaattgtaaatattgtgaaaggagatagagacaatgaataaacaaatacaaacagaagcagatgaattaggtttctttggtgaatatggagggcaatatgttccagaaacattaatgccagcaattattgagttgaaaaaagcttataaagaggcaaaagcagacccagagtttcaaagagaactggaatactatttatcagagtatgtaggacgcgcgacaccacttacatatgctgcatcatatactgaaagcctaggtggcgctaaaatatatttgaaacgagaggatctaaatcatacaggcgcccataaaattaataatgcgttaggtcaagcgttgcttgctaaaagaatgggcaagaagaagcttgttgctgaaactggtgcgggtcaacatggtgtagctagtgctacggttgctgcattatttgatatggaacttgttgtctttatgggaagtgaagatattaaaagacaacaacttaatgtatttagaatggaattacttggtgcaaaggttgtggcagttgaagatggtcaagggactttatcggatgcagttaataaagcattgcaatattgggtaagtcatgtagatgatacacattatttattaggttctgcattaggtccagacccgttcccaacgattgttagagattttcagagtgtgattggtaaagaaataaaatcacagatattgaagaaagaaggtcgacttccggatgcaattgtagcatgtatcggtggtggctcaaatgcaatcggtacattttatccatttattaaagatgatgttgcattatacggtgttgaagccgcaggtcaaggcgatgatactgataaacatgcacttgcaattggcaaaggatcacctggcgtattacatggtactaaaatgtatttaattcaagatgaagatgggcaagtgcaactagcacattctatttcagcaggacttgattatcctggtattggaccagaacattcttattaccacgacattggtagagtaacttttgaaaatgctagtgatacacaagcaatgaatgctttaatcaactttacaaaacatgaaggtattatacctgcaattgaaagtgcacatgcactgagttatgttgaaagactagcgcctacgatgtcgaaagaagatattattgtagtaactatttctggacgtggcgataaagatatggaaacaattagacaatatatggtagagcgaggtcttgcaaatgactaaattatttataccttatattatgggcaataaagatttgattgaaaatgcaacattgttgagtgaaaatggtgcagatataattgaaattggagtacctttctctgatccggttgctgatggtccagttatcatggaagcaggtcaacaagcgattaaacaaggcatcacgatagattatattttcaatcaattagaaaaacatggtgatcaaattaagtgtaactatgtattaatgacgtattataatattatttgtcattatggagaacaagcgttttttgaaaaatgtcgagatactggtgtctacggcttaattattcctgatttaccatatgaattatcgcagcgtttaaaacaacaatttagtcactatggcgtcaaaatcatatcgttagttgcgatgactactgatgacaaacgtataaaagatatcgtatcccatgcggaaggctttatttatactgtgacgatgaatgcgacaacagggcaaaacggtgcgtttcatccagaattaaaacgaaaaattgagtcaattaaagcgatagccaatgtgccagttgtcgcaggatttggtataagaacaccacaacatgttgcagatataaaagaggttgcagatggcattgtcattggtagcgaaatcgttaagcgatttaaatctaacacgcgtgaggaaatcattaaatatttacaatctatccaacaaacattgaataattaagtttacttgatttaaaaaaattaggcgaatactgtttgaaaaagtgaaaaacggtgaattataaaattgaatacaatttcaaaaaaagtaatatgagcaaacccaaacgttcatattactttttttgaaattgtattcaaaaatctaaatattactataaaagtatacgcaattaaagcgtttatgttttagttttaacattaactattgtatacttatttagattagatttattatttttgacatttgcagaggggaaatagaaaaactgcaaatacggaaatgaaattaattaacgagagacaaataggagtaatgataatgaagtttacaaatttaacagctaaagagtttggtgcctttacagatagcatgccatacagtcatttcacgcaaactgttggccactatgagttaaagcttgctgaaggttatgaaacacatttagtgggaataaaaaacaataataacgaggtcattgcagcttgcttacttactgctgtacctgttatgaaagtgttcaagtatttttattcaaatcgcggtccagtgattgattatgaaaatcaagaactcgtacactttttctttaatgaattatcaaaatatgttaaaaaacatcgttgtctatacctacatatcgatccatatttaccatatcaatacttgaatcatgatggcgagattacaggtaatgctggtaatgattggttctttgataaaatgagtaacttaggatttgaacatactggattccataaaggatttgatcctgtgctacaaattcgttatcactcagtgttagatttaaaagataaaacagcagatgacatcattaaaaatatggatggacttagaaaaagaaacacgaaaaaagttaaaaagaatggtgttaaagtaagatttttatctgaagaagaactaccaatttttagatcatttatggaagatacgtcagaatcaaaagcttttgctgatcgtgatgacaaattttactacaatcgcttaaaatattacaaagaccgtgtgttagtacctttagcgtatatcaactttgatgaatatattaaagaactaaacgaagagcgtgatattttaaataaagatttaaataaagcgttaaaggatattgaaaaacgtcctgaaaataaaaaagcacataacaagcgagataacttacaacaacaacttgatgcaaatgagcaaaagattgaagaaggtaaacgtctacaagaagaacatggtaatgaattacctatctctgctggtttcttctttatcaatccatttgaagttgtttattatgctggtggtacatcaaatgcattccgtcattttgccggaagttatgcagtgcaatgggaaatgattaattatgcattaaatcatggcattgaccgttataatttctatggtgttagtggtaaatttacagaagatgctgaagatgctggtgtagttaaattcaaaaaaggttacaatgctgaaattattgaatatgttggtgactttattaaaccaattaataaacctgtttacgcagcatataccgcacttaaaaaagttaaagacagaattttttaggaagggaattatcaaaacatgaaatttacagagttaactgttaccgaatttgacaactttgtacaaaatccatcattggaaagtcattatttccaagtaaaagaaaatatagttacccgtgagaatgatggctttgaagtagttttattaggtattaaagacgacaataacaaagtaattgcagcaagccttttctctaaaattcctactatgggaagttatgtttactattcgaatcgtggtccagtaatggatttttcagatttaggattagttgattattatttaaaagagttagataaatatttacagcaacatcaatgtttatatgttaaattagatccgtattggttatatcatctatatgataaagatatcgtgccatttgaaggtcgcgagaaaaatgatgccctagtaaacttgtttaaatcacatggttacgagcatcatggctttacaactgagtatgatacatcgagccaagtacgatggatgggcgtattaaaccttgaaggtaaaacacccgaaacattgaaaaagacatttgatagtcaacgtaaacgtaatattaataaagcgataaactatggtgttaaagtcagattccttgaacgtgatgagttcaatcttttcttagatttatatcgtgaaactgaagagcgtgctggatttgtatcaaaaacagatgattatttttataactttattgacacatatggagataaagtattagtaccattagcatatattgaccttgatgaatatgtgttaaagttgcaacaggaattgaatgacaaagaaaatcgtcgtgatcaaatgatggcgaaagaaaacaaatcagataagcaaatgaagaaaattgcagaattagataagcaaattgatcatgatcagcatgaattattgaatgcaagtgaattgagcaaaacggacggcccaattctaaaccttgcttctggcgtttattttgcaaatgcatatgaagtgaattatttctctggtggttcatcagaaaaatataatcaatttatgggaccatacatgatgcattggtttatgattaactattgcttcgataatggctatgatcgttataatttctatggtttatcaggtgattttacggaaaacagtgaagattatggcgtataccgctttaaacgtggatttaatgtacaaatcgaagaattaataggggatttctataaaccaattcataaagtgaaatattggttgttcacaacattggataaattacgtaaaaaattaaagaaatagatgtaaatgatgttagggcttatagttattgatactataggctcttttttatatgttttttaataaagcctcgaataatgatatattaaatgacaagtttaacaagtgattgcaataaatataaatatgaattgcacaacctatttgtaaatgattgagttgagtatactttttaattcattcaatatgactcaaaacaagccaatatgtattatatttttggtgaataaaccttagcataacaatttatgtctgattatatatgtgtgtgtttgcaagtgtgtgatatcaaatgtcatatttgtctaattgtaatttataaaatgcatgagcaatgattgctgtaacaaattctagcaaagtattcagtttgtattttagaaataaaaatgatgatagatgtatgatcgatataaaagatttaatatgcaccaaaacgtgagtaattggtttaatgaaacataacatgaatgtaaatttagcttactgacataaacactacacaaacatacagttatataagtccccttatggaatttcacattctagtttacataatatatattataggaagttatatgtgtgtaacgcaaaaggtaccctacatcataatcattatctaatatcgtcacataacttacttatgctataatcatggtattatattgtttggagtgatttgatgagatttgtctttgatattgatggtacgctttgttttgacggccgattaattgaccagactattattgatacattgttacaattacaacatgatggtcatgaacttatatttgcatcagcacgtccgattcgtgatttgttgccagttttaccatcagtatttcatcagcacacattaattggcgcaaatggtgctatgatttcacagcaatcaaagatttctgttatcaaaccaattcatactgatacatatcatcatatcttcaaaataattcaaaagtatgagttagattatattattgatgatgattggaattatgctgcacaacttgacgctgagaacgcgatttttgagcgtttagatccacataagctggccagttgtattgatgttgcaaatatcgacacgccaatcaagattattttattaaatatagacccggcacaaattacaactatattagacgagctagataaataccatcaagaattggaaatgattcaccattcaaatgagtataacattgatataacagcgcaaaatattaacaaatatactgcattacaatatatatttgatgcagatgttaaatatatagcatttggtaatgaccacaatgatattgtcatgttacaacatgctagtagtggctatattataggaccatcagaagcatacacacacgcaatattgaaacttgataaaatcaaacacatcaataataatgcacaagctatttgcaaagtcttaaaatcatataaataaaaacacccctatcaaatgataatcattatcaatcgataggggctattttaataaaattcgtcctcgaacatttcttcctcttcatctaatccaaataattctgccatttctccatgttcaattaacatgtttaaatatgcatcgcggagttcttcttcactcatatcattaatcatttctttaagactatcaatccacatatttctgcgtaattgatagtcttcttcaacttcgtttaacatcattatatgtttatttgctgcttctggactagctgtaaagagtaatgcaatcatatgtttacatatcactcgtcttccatcagcatgaggacaattacatatggattttctaggatgttccatatcaatataacaacgatatactttgttgccactgccctttacttcagcctcatgctgcgtttctgaaaatgattttaagttaatgacgcattcactttgataataattaaagcctctttctatagaacgaatacttgcaatatcaagtaatcccattaatgatactcctttttattattatttttaaataaagaaaataaaatagataagtgtctagattaaaatacttgatttatctatattttataacaagtctagaattatcgcattcttaaataactaatatgaaaatgcttgcactaattcttttgtataagggtgtctatcaacattaaataattcctctattgcaaaatcatcgactatcatgccatccttaagaacgataattctattaactaagcgttgtaacacggataaatcatgagaaataacgataaaatgatttaagttcgtaatcgtttgcgcttttaatatattgattacattttgttcagctataacatctaaatttgaagttatctcatcacatattaaaacgcgaggctgtgctaataacgaacgcatgacattaaatctttgtaattgtccgccactcacttcgcttggtaatttagtcaataattgcgcgtttaactcaaaagtagataaatgttgtaataataattgatcctgagcagtattatcagttagacctctgtaataatataacgcttcttttaatgaggtctcaatcgtccaatcagggttaaagctagttaaagggtgttggaaaatcggtaacacagcattgtcacttaagtaaatctctcctttaacaggtttaaacaagccaagaaccaatgaagcgagcgtacttttaccacagccactttcgcctaaaataccaacattttctccatcaggtatagtaatattgatatcttgtagcaccatctgctttttattataaccaaaagtcacatgttttaactcaatcatagtaatccctctttaattgtgttctatatttaattagacgttcagtatacggatgcaaatgctcatacttgaaatgattaatattacctcgttcaatgatttgaccttcttttaaaacataaatgtactgacaatatttcaatacatgacttaagttatgtgtgataataaataatgtttgaccatgttctaatacaatatgctgtaataaatccatcacttgattaccgttcaaagcatccaatgatgcaactggttcgtctgcaatgattaatttaggctccaacatgagaacgcttgctatgtatacgcgttcaagttggcccccagaaagttggaaactatatttatttaatatatctttgctttgtaaattaacccacgacaaagccttatcaactttggacaaagcctcttctttactacctttataatgcttacgataaatcgcagttaactgtttacctaatttagtatggtcgttaaaactttctgcataattttgagaaatatagccaattgtatgaccataatattgactcaatctactaacattttccccatcaaattggtacgaatcatacgtgcagcttaaatcaaatggtaaatattcaagtaaagctttagcaatcaaactttttccagcgccgctctctccaatcaaggcattaatctgttgactaaaaattttcaaatcaatccctttaataagagatttctcactagtattctttattgttaaattttgtatatcaatgagactcatcatattcaccccgttgtttcagcaatctatctcttagtgcatcaccggttaaattaaaaattaaaatagttatagcaatgactgaagcaggtgcaatcaacataattggatgagacgaaataaaatcacgaccttgttgcaacatagcgccccactctggtgttggcggttgtgcacctaacccaataaatgatagtgaacttatatatagaatgattttaccgaaatcaacgaccatcaaaacgataatagccggtataattttaggtgttaaatgacgtattaatattgttcttgttggtacatgaaataattgtgccatttttatataaggcttattcatttcgctattaactatacttctagtcaaccttgtgtaattcatccattttattaatgtaattgagataactaaattccataaagatggttgaaaaaaacttgctaaagcaatcatgatgataaattctggaatacttagaccaacatcaataaaccttaacactaatcgttcaatccacccttttttgtatccggcaaatagacctagtgtaacacctatgacaacgatagctattaatgttaaaacagtaacaaacaatgttgaacgtgcaccgataataattcgggtaaataaatctctcccataatcatcagttcctaataaatgcaaccaactaataggttcaaaagtttgtgataaattgactttggttgcattttcactactgacaaagaattgcagtacaattaccacaaaaataaatgcaacgaatacaaaaaatatcaggttattctttgaaaatattttatgcatgacggtcactactttctgatatcaatggtgtattggttttgatttttggatttcctaattgtaaacgctgcttcggatcaagtaataacgttaataaatcagcaatcgtattgataataacaacgaagaagccaataaataacacgcatccttgaataacaggataatctcgagatttaatactatccattaatagataaccaataccaggtatatcaaataaattttcaatcactacagtaccacctattagactgccaagtgaaatccctagtaatgggataatcggcaaaattgttggttttagtaaatcatgaattaaaatataacgttcattcataccgcgtaatcttgatgcttgtacgatattactttgcaataacatcaataaattagaacgcactaaacgaatgatgtatgcacacatacctaaagatagcgtgattacaggtaatataaactgacttagtataacgctatctatattcattaaatttgtgacaataaataataaaataataccgataaagaacgctggtaaactaatcgatagtgttgagatcactctaatcactttatccgtccacttatgaaatcgtttggctgctataatgccgagcggtatagatatgcataacgacactactaatgttgaaaatgatatgagtaatgttatgggtgcatagttgaataatatctgtgttaccggttcttttgattcaaaactttttcctaaattaaaatgtaataaatgattcatccaatgccaccactgtaccaataaagaatcatttaatcccaatttatctttggttgcatttatttgttccgtcgacacttgtgctacatcaagatgtaatattttatcaacaggattgcctggtgataatttcattaaaatgaatgtaagtgtagaaataacaaataaaacaactatcatttgcatcagtctatacaacatagactttattatgaacataatagtccccctccttgtgtaagttactaacactttctttttacatgagaatggcgcatgtatatgcaacttacatattaagaactaacgttcattatagtattatccataaagaaattgaagtatatttaattttttaacaaaatcattataaaatataatattttgaatcaagtcaaccatgtaaaatataaaaaagtcaaaacaaaaacaactatagcactgtattccatctctttcgaaataattgttactgcagtgtaacttaaaagtcgatgattttgtgcatatagttgtcgaatattattttttatctttacggcgaagttcagcgccctcatagccgtatttttcaatttgcttttctaatttacgcgcttttctttctttacgccaatttctagtaaaataccataatagaaaactaattaataaactcataatcgctaaaaatgcagcgtatcctaataatggttgatattttatatcttgaaaatttggaataaaaaatgcaagcacacctaatataacaaatgtaattactgcagatacaaaccatttatttaaaactaagcaacagaatattgttaataaaatcattattaatgttgtgatccataaataattaggcatatcgaataatgtcatattcattctccttttatttcattactttccttgtatacattttattataaatttttaaaaacttaaacaatagcagtcagtttcaagcaatattctatctactaatagaaaaatcattgttccttgcgacatggaaatcgtaacattatcgtttaggagacaaaattatgtataatgaatgtattataccaaaggagtgattatatgtctcaaggtttacctttaagagaagatgttcctgtttcagaaacatgggatttagtagacttatttaaagatgatcaacaatattatgaaagtattgacgctctagtacaacaagcaaatcaatttcatcatacatatgcaacaacattaaattcaatcgaacaaattaatactgctttagctgaattagaaaatattttaattgccttagatcgcttaagtaattatgcagaactacgtttaagtgtagatactagtaatatcgaggcacaagtattgagcgctaaattatctactacatacggtaaaattgttagccaattatcatttgtagagtcagaaatacttgaattaccagaagaaatacttcaacaattagaagaatcatgtccatatcaacactatattaaacagttaataaaacaaaagccattccaattatctgcgtcggtagaacaagtattagcaactttatcacctacgctaaacagtccttacgatttatacggcacgacaaaaatgctagatattacattcgattcatttgaacatgatggtacaacgtaccctgtcgactatgctacgtttgaaaatgattatgaagataataaagatcctgagtttagacgtaaaagtttcaaatcgtttagcgatgggattcgaaaatatcagcatactaccgcggctacatataatatgcaagtacaacaagaaaaaattgaagctgatttacgtggatttgaatcagtcatcgattatttattacatagtcaagaagtaacgcgtgatatgtttgaccgtcaaatcgatatgattatgcgtgacttggcaccagttatgcagaaatatgctaaacttttacaacgtattcacggattagataacatgcgttttgaagacttgaagatttctgtagaccctgattatgaaccagagatttcaattgaagactcaaaaaattatattttcggtgcgttaagtgttttaggtgatgactatacaaacatgttacgtgaagcatacgatcagcgatggattgattttgcacaaaataaaggtaaagatacaggcgcattttgtgcaagtccatactttacacattcatatgtgtttatttcttggactggtaaaatggctgaagcatttgtcttagcacatgaattaggtcatgcaggtcattttacattagctcaaaaacatcaaccatatcttgaatcagaagcatcaatgtactttgttgaagccccttctacaatgaatgaaatgttgatggccaattatttatttaacacaagtgataatccaagatttaagcgttgggttattggctcaattttatctagaacatattatcataatatggttacccatttattagaagctgcttatcaacgtgaagtgtatcacaaagtagatcaaggtgaatctttaaatgcgccgacattaaatgaaataatgctaaatgtttataaacaattttttggagatgcagtagacatgactgagggtgctgaattaacatggatgcgtcaacctcattactatatgggattatattcgtatacgtattctgctggcttaacaatcggaactgtcgtttctcaaaagattaaaaatgaaggccaaccagctgttgatgcttggttagaaacattgaaaaaaggtggtagtgtatcacctgtcgaacttgcaaacattgcaggtgtagacattactacagaacagccacttaaatctacaattcaatatatttctgatttagtcgatgaagttgaaaaattaacagatgaaattgagcaagcaaataactaagatgcgagacaatttatagtagaacaatataaaccaagattttcacattactaattgtgagaatcttggtttttttgagggtttatgaataatagaaatatatatttatcgtaagggattttatagtaataactttaagttattgttcgtaatgtgtacctgttaaataaaaataaacactttcagcgatgttaataatatgatcaccaatacgttctaaatgtcttgctgctaaatgagcttgtgcagcgacaaatggatcgttatcaataagatacgttgcgttaataatatgactatataagtcatcgatatcttcatcacgctcaattatttctcttattaatacggtatctttctttttaaatgcttgatctaagtcctttaacattaacatagctaatttacccattgtctttaaacgggttaacacataatcatctgtaatctttgtacgcaatcgaatattggcaatactcgaggcattatctcctattctttctaaatcggaggcgatttttaatgaagaaatcatcatacgcaaatcactcgcaatgggctgttgctttgtaattaacatgataactcgctcattaatatcataatttaattgattgatatgtttatcgtttttaactgtttgtcgtgcaaagcctctatcgtcaatacttaatgattttataccattttcaatactcacatagacatttgcacctaaccgacgtaattcttttattaaatcatcaagttgctcctgatatcgttgtctaattattgccattatatatcaaccaaaccttcctgaaatataatcttctgttttcttgtttgatgggttagagaaaattttatcagtatcatcatattcattgacataaccatttaagaaaaatgcagttttatctgatacacgagctgcttgttgcatattatgtgtaaccataataattgtatacttttcttttagttcttgaaccaactcttctactcttaatgttgagattggatctaatgctgatgtcggttcatccattaaaatgacttcaggttcaattgctaaacaacgcgcgatacaaacacgttgttgttgcccaccggataaactatatgcatttgtgtgcaacctatcctttaattcatcccaaattgcagcgccacgtaatgatttctcaacgatttcatcaagaacttttttatttttaataccgtgaatctttggaccgtaagtaatattatcgtatattgattttggaaatggattaggttgttgaaagaccatgcccacatttgtacgtaattgttctttagaatatttttgatcaaaaatgtcttgatctcgatataatattttaccagctgttttcacagaaggtactaactcaaccattcgattcaaagttttaatatatgttgatttgccacaaccagatggacctataatggcagtaatttggttttcataaatatctaaattaatattttgtaatgcatgattttcgccataccataagtctaaattttgtgttgaatatataacagaatgtgagtttgtatcatctggtgttttatgatgactttgtgagacatcaaacgtatgactttgagatatttgtttagtttgtgcaagtgtttgcgccatatttaaaactccctttttaatagataaatgagattgattgtttaaattagaattttttactaaatttgttacgtaaaataatcgcaacgccattcattaagattaagataactagtaaaacgataatgcctgccgatgcaacattctggaattcttcttgaggcattttcgcccaagtaaatatttggataggtaatgctgaaaattgatccaatatacttctaggtgttgccaataatatagtcggtataccgattagcacaagtggcgctgtttctcccagtgctcttgaaagagacaaaatgaatccagttaaaataccaggtaacgctgctggtaagacaacacgtcttatcgtttgccatttattagcacctaagccgtaagaagcttcgcgtactgagttaggtacagctctaattgcttcctgacttgaaacaataataattggtaatatcagtaaggtcattgttagcgctgctgccaatatactgttacccattttcaaggcttcaatccctgcaccaccaacgaacaaagtataacctaataacccaaatacaactgatggtacaccagctaaattggaaatactgattttaacaaactgagtaaatttgttgtttttcgcatattcttctaagtatatagctgtacctattcctaggatgattgataatggaatgatacttaacattaaccaaagtgaaccgattaacgcgcctttaacgccagccatagatggtgttgaagaagaaaaattagtgaaaaactgtaaatttaaatgacttacccctttaatcaatgtttgagttaacaacgcaataagtacgacaagtcctaataatgtacatgctaaaaatatgagtttgaacactttatttttaaccgttctggatgataaatgtttttggacaagttgttgatcgacgagtgattgtctattattatctgtcgtttccatattaatactcctccctaaaacgcttagaaatccactgagaaagtaaattcatgattaaggtaaagataaatagtgtgaaccctacagcataaatactgtaataaatatttgatccaaatgttgcatcacctgtcgctatctcaacaatatatccagtcattgtttgaatcgaacttgttaaacttaatgaagctgttggcgaactacctgccgctaatgatacaatcatcgtttctccaattgctcttgaaatcgcgagaacgattgaagctacaatacctgatgttgctgcgggaagtacgactttagttgctacttctaatttagttgctccaagtccataggcaccttctcgaattttatttggtacagatgccattgcatcctcactcaaacttgtgatgagagggacaatcataataccgacaactaagccgggacttatagcattaaactctccaagacctggtatgaaagatcttaatactggtgtaacaaaggttaatgcaaagaaaccaaacacaattgttggtattcctgctaaaatttctaatatcggtttaattatgcgtcgtgcacggtcacttgcatattcacttaaataaattgctgcaccaagcccgactggaactgcaaatatagtcgcaataactgtgatttttaaagtccctattatcaatgcccagataccaaacttagggtctgaaccggtaggattccaagtagtagaaaatagaaattcagttattggaattctggtgaaaaaagtgatggtttctaaaagcaatgtgattaatatacctagtgttgttaaaatggaaatcgctgaaattgcggctaaaataactggtataattttgtcattatgctttccttttttattattatttttttcgattaaagctttaacattagtagatgaagtcataatcaaacctctttctattactcccaaaataattagatttgtaaaataatgatgaaccactattttaagttgataagcttgtagactaactgaatgtcaaaatcagcgtctcgataaatcaagctttgtactctaaataatgattcaccatcaaaatcatgtttcaagacacatttgaaattgcgtcttattattttttgtcttcagactttttatcatcagatttcttgtcgtctgatttttgatttttatcaataaatgcttttaaatcatctaattgtgatttgtatgttttctctggtgctgctacatatccagcttcttcagctgctttacctttatcttctaagacgaatttgataaattctgacattactttattatctttcaatgctttttcatttacataaatgaataatggtctacttaatgcataagagttatcttgaattgtttttttcgtaggctctgttgctttaccattttcatctttgattttaacttcttttaatttatctttattttgtacgtagaagttatatccaaagtatccgattccctctttgtttttcgttacagaagaaacgatagcatttgtatcagcatttttttctgctttaatatcttctttattcattacttcattttcaaagaagtcataagtaccatgacttgagtttggtgatacagcatttatttttttatctggccatttactattaacatctttccatgttttagcttttccagaataaattgcttttaattgctgtttgtctaattcatctacaaaatcattttctttatttacagcaaccgttacaccatcttgcgcaattttgaattctttgtatttgatattcttatcttgtaatttttgcttctcttcatctttaattggtctagaagcatcagcgaagtcgatatctcctgcaatgaatttttggaaaccagcacctgtaccagcttgtcctgctgagattttagcatccgagtgatcttgagcccatttttcatttaatttctccacaattggtgctactgttgatgagccatcacctttagcttccccttttaaatcactattaccactgccaccattaccgccaccacaagcacctaataatagtgttgcacctaaagctgtagtaccaacaaattgccattttttcattgaaatatcctccctgtatgaacaacaaatagtatttgtattgattacatctttatcttaaccttgaattattaacctcatttttagaaactgtaaatgttacataaaaaattgttaagaaaatgtaaatattaatttttgttaatctaaaaaatattgcttcattagtaaaattaaaatgcttcctgaaaaattatcgaaatttaaatatgaatacaaaaatggctgggacataaatccctaaaaaaacagcagtaagataattttcaattagaaaatatcttactgctgttctctatttatacaatacttcgtattgaatggcttcgctttgcccgtctgtcacattactgtaaaattctataaatagaatttttgatgacgggtcccttcctagggtgccgtctcagccaccccaaccggcacattgttgtaagctgactatatgtcagcttctgtgttggggcccctgtcttcgactggcactgctccctcaggagtctcgccattaatactacgtattaacatgtaattttactttgaaatacattaaagcccaaattaatcaaaagctttctgaaccagaaacgaaaaaaatctatagtcatagaaaaatttatgtagagcctgtttttggatttatgaaggctattttgggtttcactcgaatgtcagttcgaggaataaataaagttaaacgagagctaggttttgtattaatggcacttaatataaggaaaatagcagctcaacgagctgtacattataaaatacatatcaaaaaagctgatttccatcaaataattaatagaaatcagcttttttacattgcctaagaacttaatgtcccagcctattcgtttgaattatttaattttttactttgaaaggaatgtttaaaaaactacttcatctgtccgatttaatattgaataaaaaaaacacgcatcctacgacacgtgtaaaaatgattattcttttgagtccattcgactccaaccttttttagttaaagcgattttacctgtttctatattaataatcttctgtttatataagtgaccgattgcacgtttgaatgaacctttactcatattgaatacttctttaatcgcttcagggcttgatttgtcccagaatggtaattcaccatcatattcaactagtaaatcaaagatgacttggccgtcatcgtctaaacgttcatgtgcaagtggtaaaaatgaaccatttaactcacctttatcattatgcccgataattctaacttgaacagattcacctaatcttggttcagctttacgttctgattcatgtacgaaaattttgtaacctgattcgcttaataaaaagctaccaattcgtaatacgcggtaaggtttggcttcaatgacttcgttttttaaattatcgtcgtgtacaggtgtaaacatattttctacaacagattcactcgctaaacgtccatacatatgattctcacggtcaattcgtaatgtaactagcaaataatcaccaggttgtggccatagtgatttcacttttggtaaatcttcccatggtactaacacttcacggggtaatccaacatctatacgtgccccatcgcgatccgttttaagtactttagcaaagtcatatttatctttcgtaatatcaggcatattttgagttgcaaataattcacctgaacggtttggataaatgaagaaactatattcttcacctacttctaattcatcatcatcgttcatttctgattggtttaactttacgttttcaccgtttggtccttttaaaaggtaagttgaaccttgtaaccctactacttcaaggaattctatagaacctactatatctttgtctaatgccatgttattctccttcgattcttgtattctttattattataacatgtgtgagtcattctatcattacaacttatatgaggtcgaaactgtgacgataatatgatataattcttccgttagaatatcgaatgaaaaaaaggagaaaatgcatgttacaagtaactgatgtgagtttacgttttggagatcgtaaactatttgaagatgtaaatattaaatttacagaaggtaattgttatggattaattggtgcgaatggtgcaggtaaatcaacattcttaaaaatattatctggtgaattagattctcaaacaggacatgtttcattagggaaaaatgaacgtctagctgttttaaaacaggaccactatgcttatgaagatgaacgcgtgcttgatgttgtaattaaaggtcacgaacgtctttatgaggttatgaaagaaaaagatgaaatctatatgaagccagatttcagtgatgaagatggtatccgtgctgctgaacttgaaggtgaatttgcagaaatgaatggttggaatgctgaagctgatgctgctaaccttttatctggtttaggtatcgatccaactttacacgataaaaaaatggctgaattagaaaacaaccaaaaaattaaagtattattagcgcaaagtttattcggtgaaccagacgtactattactggatgagcctactaacggtctcgatattccagcaatcagttggttagaagatttcttaattaactttgataatactgttatcgtagtatcgcatgaccgtcatttcttaaataatgtatgtactcatatcgctgatttagacttcggtaaaattaaagtttatgttggtaactatgatttttggtatcaatctagtcagttagctcaaaagatggctcaagaacaaaacaagaaaaaagaagaaaaaatgaaagagttacaggactttattgctcgtttctcagctaacgcttctaaatctaaacaagcaacaagtcgtaaaaaacaactcgagaaaattgaattagatgatattcaaccatcatcaagaagatatcctttcgttaaattcacacctgagcgcgaaatcggtaatgacttactaatcgttcaaaatctatctaaaacgattgacggtgaaaaagtattagataatatttcattcacaatgaatccaaatgataaagcaattttaattggggatagtgaaattgcgaaaaccacattgcttaaaatattagccggtgaaatggaaccagacgaaggttcatataaatggggtgtaacaacgtcattaagttacttccctaaagataactcagaattctttgagggcgttaatatgaaccttgtagattggttaagacaatacgcaccagaagatgagcaaactgaaacatttttacgcggcttcttaggccgtatgctatttagtggagaagaagttaagaaaaaagctagtgtactttcaggtggagaaaaagtacgttgtatgctaagtaaaatgatgttatcaagtgcaaacgttcttttacttgatgaaccaacaaaccacttagacttagaaagtattactgctgttaatgatggacttaaatcattcaaaggttctattatctttacttcatatgactttgaatttatcaatacaatcgcaaaccgtgttatcgatttaaataaacaaggtggcgtttcaaaagaaattccatatgaagaatatttacaagaaatcggcgttttaaaataaacataatatgtagaatttcttttcgaaaatctctgtattgaggcccgaccaacttgcacattattgtaagttggcttactgtcaccttctatattgggacttattccgcaacttgtattgtttgtagaaattaggaatccaatttctctatgtgttgcaccgacaaggattgaaaaaagctagctacaaagtcattttcattcagtcaactactgtcaatataacattgcagggcctagggcattgattcatgtccgagactatattcaatttaatagacattaactgggcgtctcgatgctaatatttatagcatcgaggtgtcctttttattttattttttaacacatcagcatagtgaacaccccttctctaaattacaaatacagttatcaacgcattaaaagagtacatttatttaatgtgcatattgattatgctataagtattttgaattttatttttcaaaaagtctcattatcaccaccttttaaaatataagcaacgctataacttgaattttcaggttattccaaaaaatctaaattatcggtttacattcatatttgtcatatgtataatgaacacataccaatttaataatattttgatgaggcgcatcaatcatgagtaaagtttagattactgtctgctaacagctaaatttgaaagggtgcgatgccgaagcaattataatagcagttataatttgttggactttttggttaagagctgagagtttgtcattatttaaaaataatggagtgcatcacttgtatatagattaagagcaagttcgcattccgaacttgttctttttttattattgtgtgcccttcctaacaattaggaggattatatggtaacaagaagtgtgttgaaatttggcggatcatccgtcagtgattttacaaaaataaaaaggatcgctgaaatgttaaaggagcgagtcaatcaagatgaacaattaattgtcgttgtaagtgctatgggtaacacaacagatcaattaatgacgaatgtatcaaccttgactaaagcaccaaaacaacaagaactggcattattattgacaaccggagagcaacaaactgtatcttatttatcaatggtattaaatgatatcggtatgaatgccaaagcaatgactggctatcaagcgggtattaaaaccattggccatcatttaaaaagtaaaattgctcaaattaatcctcaaacatttgaacaagcctttcaagaaaacgatattttagtagttgctggatttcaaggcatcaatgaacatcaggaattaacaactttaggcagaggtggttctgatacgaccgctgtggcacttgctgttagtaatcaaataccttgtgaaatttataccgacgttgatggtgtgtatgccactgacccaagacttttaccaaaggctaaacgactagacatcgtctcatatgaagaaatgatggaaatgagcgctttaggtgctggtgtacttgaaacaagaagtgttgaattagctaaaaactataatatccctttatatttaggaaaaactttatcgaacgtgaaaggaacatggattatgtcaaatgaagaaatattagagaaaaaagcagttactggtgtggctttggataaacatatgatgcatgtaacaattagttatcccctacctgacaatcagctacttacccaactatttacggaacttgaagaaggtgctgtaaatgttgatatgatttcacaaatcgtcaacttggatgggctacaactatccttcacgattaaagatagtgattttcatcaaatttctatgattcttgaaacattaaagaatcaatatgaagcattagcttataaaatcaatgagcattatgtcaaaatttcattaattggctcaggcatgcgtgatatgtcaggtgtggcatcaaaagcatttttgacattaattgaaaataatatacctttctaccaaacaacaacatctgaaataagtatttcatacgtcattgatgattttaatgggcaacaagcggtagaaaaactatatgacgcatttaacatttaatggtaaaatgattgttaaaatattctaaaaattggaaattattataaaatggagtgacaagttatgacaaagttagcagttgtgggtgcaacaggattagtaggtacaaaaatgttggagacattaaatcgtaaaaatattcctttcgatgaattagtattattttcatcagcacgttctgcagggcaagaagttgaatttcaaggaaaaacatatacagttcaagaattaactgatgctcgtgcaagtgaacatttcgattatgtattaatgagtgctggtggcggtacaagcgaacactttgccccactttttgaaaaagctggtgcaatcgttatagacaattcaagtcaatggcgtatggcagaagatattgatttaatcgttccggaagtcaatgaacctacatttacaagaggtatcattgccaatccaaactgctctacgattcaatctgttgtacctctaaaagtattgcaagatgcttatggtttaaaacgagtggcatatacaacatatcaagctgtatcaggttcagggatgaaaggtaagaaagatttagctgaaggtgtaaatggtaaagcaccagaagcatatccacatccaatttataataatgtgttaccgcatattgatgtgtttttagaaaacggatatacaaaagaagaacaaaaaatgattgatgagacgagaaaaattttaaatgcgccagacttaaaagtaacagcaacatgcgcacgtgtgcctgttcaagatagtcatagtgttgaaattgatgtaacgcttgacaaagaaacaacagcagaagatattaaagcgttatttgatcaagatgaccgcgttgttttagtagacaatccagagaacaatgaatatccaatggcaatcaattctactaataaagatgaagtgtttgttggccgtatacgtagagatgattcattagaaaatactttccatgtatggtgtacatcagacaatttattaaaaggtgctgcattaaatgctgtacaagtattggaacaagttatgcgtttaaaaggagcgaattaaaatgacacatttatttgagggtgttggcgttgcacttacaaccccttttacaaataacaaagttaatattgaagctttgaaaacacacgttaattttttactagaaaataatgcccaagcaatcatcgttaatggaactactgctgagagccctactttaacaacagatgaaaaagaacgcattctaaaaacagttattgatcttgtagataaacgtgttcctgtcatagcaggaactggcactaatgatactgaaaagtcaatccaagcttcaatccaagctaaagccttaggggctgatgcaattatgttaattacgccctactacaacaaaacgaaccaacgtggtttagtcaaacactttgaagcgattgcagatgctgtgaaattaccagtcgtgctgtacaatgttccttcaagaacgaacatgacaattgaaccagaaactgtagaaatattaagtcaacatccttatatagttgctttaaaagatgctacgaatgattttgagtatttagaagaagtgaaaaagcgcattgatacaaattcatttgcattatatagtggcaatgatgacaacgtcgtcgaatactatcaacgtggcggtcaaggggttatctctgttattgccaatgtcattcctaaagaatttcaagcgttatacgatgctcaacaaagtggattagatattcaagatcaatttaaaccaatcggcacactgttatcagctttatcagttgatattaacccaattcctattaaagctctaacaagttatttaggatttggaaattatgaattacgtctaccattggttagcctagaagatacagatactaaagtgcttcgtgaaacatatgacacatttaaagcgggtgaaaatgagtgaaaatattactaattggctatggcgcaatgaatcaacgcgttgctagattagcagaagaaaaaggacatgaaatcgttggggtcattgaaaatacaccgaaagcaacaacgccatatcaacaatatcaacatattgcagatgttaaaggtgccgatgttgcaatagatttttcaaatccaaatctgcttttccctttattagatgaagattttcatttgccattagttgtggcaacaactggcgagaaagaaaaactacttaataagttagatgaattgagtcaaaatatgcctgtgtttttcagcgcgaacatgagttatggcgttcatgcattgactaaaattttagcagctgctgttcccctacttgatgatttcgacatcgaattgactgaggcacatcataataaaaaagtagatgcaccaagtggtacgttagaaaaattgtatgatgtgatcgtatctttgaaagaaaatgtaacacctgtgtatgatagacatgaattaaatgaaaaacgccagccacaagatattggtatacattctattcgtggaggtacgattgtcggtgaacatgaagttctatttgctggcactgatgaaacgattcaaatcacgcatcgtgcacaatcaaaagatatttttgcgaatggtgcaatacaagcagcagaacgcttagttaataaaccaaacggcttttatacgtttgacaacttataaacatattaaaggagatcgattattttatggtacaacatttaacagctgaagaaattattcaatatataagtgatgctaaaaagtctacaccaataaaagtatatttaaatggtaattttgaaggcatcacatatccagaaagttttaaagtatttggttcagaacaatctaaagtaatcttttgtgaagcggatgattggaaacctttttacgaagcatatggtagtcaattcgaagatatagaaattgaaatggatcgtcgcaattctgctattccattaaaagacttaacaaatacgaatgcacgaattgaaccaggtgcgtttattagagaacaagccattattgaagatggtgctgtcgttatgatgggcgcaacaattaatattggcgcagtcgttggcgaaggtacaatgattgatatgaatgctactctcggtggtcgtgctacaactggtaaaaatgtacatgtaggggctggcgcagtattagcaggtgtgattgaaccccctagtgcttcaccggttataatcgaggatgatgtattaatcggtgcaaatgcagttattttagaaggtgtacgtgttggtaaaggtgctattgttgcagctggcgcgattgtgacacaagatgtaccagctggtgcagttgttgctggtacacctgcaaaagtgattaagcaagcttctgaagtacaagatactaaaaaagagattgtagcagcattaagaaaactgaatgactagtgacgtcaacgtataataatttcaaggttgagatacgattatgtctcaaccttattgtttagcattgaataaacttatgatcacaaatttcgaaatacgttacactatttatatagtaatttaacacaaaggattgataattatgaatgaattagaatttgttacgaaacatcgccgtcatttacatcaacatcctgaattaagcttacatgaatttgaaacaactgcttatattaaagcgtttttagatagtttaaatattaaatacgattgcccattggaaactggcgtcattgcatacttagaaggtaatggctcacatacgatagcgtatagagctgatattgatgcgttacctattttagaggaaaatgatgtgccttatcgcagtcaatctgatcatgtgatgcatgcttgtggacatgatggtcatacaactgcattaatgctttttgtacaacgttgcaaagacatgcaagatgcaggtcaattaccgcaaaatgtcgttttcattttccaacctgcagaagaaactggtggcggtgcaaatcgattaataaaagccggtgcctttgataagtatccaattgaagcggtatttggtattcatgttaacccatttgctgatgaaggcattgcagtgataagagatgaagaaattacggccagcgcaacagagtatcgctttttcttaacaggcctgtcaagtcatgttgctgataaagaacaaggtcattcttgtggtgaagcattacaacatgtattaactcaaatatcacaaattcaacaatttcaccttaacggtttgaaacgaaatattgttcatattggtcattttaaagctggtgaagcgattaacactgtaccaagtaatggctatttagaaggtactattcgtacatatgatattgatgatttaacaatcgttaaaaatcaaatgcacaagatagcagaaagtgtcaagcttctgtttaatgtagattgtgaagttaaatttgcagaaggttatccccctacaatcaatagtccgaaattacgtactcaaatagaggacgccttaataaaagctgatttaaatgtctatgacaaaccaacgccattcttatttggggaagattttagtttttatggtcaacaactagctccagcttactttgtttttataggaacacgaaatgaagataaaggttttgtaactggtttgcacacatcacatttaaattttgatgaaaaagtgttaataaacgtggttaatttttacgaaaatttattaaataattacaaagaggtgtaatacattgacagcaacatggtctgtaaataagaaaatatttttacaaaatgcaatcacagtcaaaaacaatcagccattaatggcagttgttaaaaataatgcatatcactatgacctagaatttgctgtaactcagtttatccatgcaggtatagatacatttagcacaacatcactacgagaagcaattcaaattagacaacttgctccagatgcaacaatctttttaatgaatgcagtttacgagtttgatttagtccgtgaacatcaaatacacatgactttgccgtcgttgacatattactataaccataaaaatgatttagctggtattcatgttcacttagaatttgaaaatttattacatcggtctggatttaaagatttaaacgaaattaaagaagtattgaaagatcaccatcataatcaaaatgcaaaaatgattattagtggtttatggacccattttggatatgctgatgaattcgatgtgtcagattataatgttgaacgttcacaatggatggaaattgttgaagcacttttatctgaaggttatcagttcgacctaatccatgctcaaaatagtgcgagtttttatcgggaaggacaaatattactaccccaccatacacatgcgcgtgtaggtattgcgttatacggttcaagaccatatagttcactgaatcaacatgatatagttcagtcattaactttaaaagcacatgttattcaagtgcgcgaagtacaagctggtgattattgcggttatagctttgcctttgaagtgactaaaaacaatacaaaattagctgtagttgatatcggttatggcgatggaattttaagaactcgtgctaaacatgaagcacttatcaatggtaaacgctacccgatacgtgcattaatgatgagccatatgtttgttgaagtagatggcaatgtacatgcacaagatgaagttattctttataataatgatatccgcatcgatgaatatacctttaaaggtgttggtgcaaattctgaacaattaagtgctatgaatcatgattctttaaaaaaggagtacatttcaaatgactgttaaatataatcaaaatggcgaattaacaatggatggtattagtttaaaaacgattgcacaaagctttggtacacctaccattgtttatgatgaactacaaattagagaacagatgcgccgttaccatcgcgcatttaaagatagtggattaaaatacaatatttcatacgcctcaaaggcatttacttgcattcaaatggtcaaacttgtagctgaggaagatttacagttagatgttgtttctgaaggtgaattatatacagctttagaagcaggttttgaaccgagtcgcatccatttccatggtaacaataaaacgaaacatgaaattaggtatgctttagaaaataatatcggttattttgttatagattcattagaagaaattgaattaatagaccgctatgctaatgatacggttcaagttgtattacgagttaatccaggtgttgaagcacatacacacgaatttattcaaactgggcaagaagatagtaagtttggattatcaattcaatatggcttagctaaaaaagcaattgacaaagtccaacaatctaaacacttaaaattaaaaggtgtacattgtcatattggttcacagattgaaggtacagaagcatttattgaaactgctaaaattgttttacgttggcttaaagagcaaggcattcaagttgaattattaaaccttggtggtggctttggtattaaatatgttgaaggtgacgaaagtttccctatcgaaagtggtattaaagatattacagacgcaataaaatccgaaattaaagttctaggtatagatgcaccagaaataggtattgaaccgggacgatcaattgtaggtgaagctggcgttactttatatgaagttggaaccattaaagaaattccagagattaataaatatgtttcaatcgatggcggtatgagtgatcatatcagaactgcactttatgacgcaaagtatcaagcattgcttgttaatagaaatgaagaagcagatgacagtgtaactatagctggaaaattatgtgagtctggtgatatcattattaaagacgctaaattaccttcatcagtcaaacgtggagactatcttgctatattatcaactggtgcatatcattactctatggcatccaattacaatcaaatgcaaaagccttctgtgtttttcttaaaagatggcaaagcacgtgaagttataaagcgacaatcgttaagacaactcattattaatgatacaaaataaaaataaacaaagtaatccccgaagcacagaaaattatactgtgactcggggaatttttatgcattatagatgactgtagaaaacatgcttggacatatactctaaaaaaggaagaacagcacatttttagttagaaagtatttatttctttttgtcattaatcctttatatttagttagccctattcaactaatttaaagcatcatatacataccacactttaaacaagcatcatgaaattagattttatgctttacttgctttttcaaataatataaaacgataagaattaacaacaaatataatgtataaaacagaatttcatcaaatccaaaatctttacttgtaattaatacatcaatatcttctaattccatcatctctgctttaatataattattaaactttggcaaagtcattaaatgtacattgtaaatatagtaataaaagtcgataaatatgatgttaaaaaatatgtatgttttatcaatattagttttgaaaaatagtatcccagaaatcattatcggaatcactaatacaatcatcattgctgctaaaatattaatatttaatccaattgcagataatacaccgaaaactaataaattagcaactaaactaaggataagatatttcataaaatcacctcgtcgttgtacaccataattatattatataaatatatttttctattgcaaacaatgttggtgatataaaaaaagagttctcaatttggttgagaaactcatcgcgttaagtatttgtaataagcatataaaaacaccttacttcttggtaaggtgttagttaaaatcaatgattcaaatctaagaattatagtttaacaacgtttgcagcttgtggaccgcggtcgccttcaactacttcaaactcaacagcttgaccttcttctaatgatttgtaaccatcttggttaattgctgaaaaatgtacgaatacgtcattttctccttcaacttcgataaagccgaatcctttttcagcgttaaaccatttaactgtaccttgtttcataatctgaaacctccaagactaaaattcattcaatatgcttattcgcatattacaaaaaatacatgcaaatttcactcaaatattctttgcaatatggaataatcatctgcttaacttgtattatagtgcagttattaccaaattgcaatacaataataaaaaatattcatttaatcaattattggtagtttataatatacttcattattttgtaaaacaatgaaactataaaatatttgtaaatcctcttcacaatcttcgcaatagttcatgtcacaattattataaaatgcataaatattatatttgcctgtgacatagttatcgaactgaactttacattgattaatcaattgttgatagtgcttaaacatgtcatcaaaatcttgatattgatatttttcaacaatgttttctggccagtcactgaataaccaccatccctcataatcggctctaattttggtaactgtccacattattaaagaccccttccatacttcaaaaactctatacttatttttatacctttatcctctgaaaatcaagtttgacgacttgaaacaaacaaagtagtaactatagtaattattagtttttttaagtaaaactacgtataataacattatgaggtggtaaaaatgagacatatacatttacaagtattcggacgcgttcaaggcgtcggatttagatattttacacaacgcattgcaatgaactataacattgtcggtactgttcaaaatgtagatgactatgtagagatatatgcacaaggggatgacgcagatatagagagatttattcaaggtgtaattgaaggtgcctcaccagcatcaaatgtaacaagccatcaacttgaagagttagaactaaatcaaaaattatcggattttcgatcaatataaaatgctaaataaaggaagatgacagtgagatataatatttctcatatatttggggtgttagtgggaattcctgtagcgtttttaacaagcatatttgggatgattgcacttgatgtatcttttttaattgatatgtctattggtattgttggctttttaatgacatacctaccgatacaaaaactcacttcacgcaaatatttaaacgaaattggtttgactagaaaagactatcgctatattcgaaatcagttaaatcatacacaccaaaaacttagaggtattttaaaaacgtatgtcaatataagatcaattaaagattttaggcagattaatgatatataccaaatttcacgttctatttatacgacagttagacagagacctgcatcattttataaagttgaaggctttttttattctcatattgataatgctttaaatttggttgatgcatatacacgtctagcaaaaatgcccaaaaaatcaattaatgaacagcaaaagttagaacaaacacgaattactttggatgaggtcaaacgaacattaatcgctgatttaaagcgtctcaacgaagatgattatgaacgtttagatattgaaatggaattaaataagttacatcaaaaacatcatcaagattgatgtaaaatagcaactattggagagatgattgatgactgaaaataaaagtttcaaagaaagccatccactagatgattttataagcgataaagaattatcgaatactactattcaaaaagaaaagttaacaattgaacaacaaaaacaggtagacacaatcagtaaacaaattaaccctttagacaatgaaggtttattagcgtttggttctgatttacagaaacaaatgtctcaattttcacatcaaatgttggatgaagtacaaagtaaagatgttggtcctattggagatactttgtcagatctaatgtcaaaactaaagtcagttaatccaaatgagttaaatactgataaaccatctatgttaaaaagaatttttagcagagcaaagtcgtctatcaatgaaatcttttcaagaatgcaatcagttagtgctcaagtcgatcgcataacgattcaactgcagaaacatcaaacacatttaacaagagatattgaattattagatacgctatatgataaaaacaaacaatactttgatgacttatcattgcatatcattgctgcacagcaaaaaaagttgcaattagaaaatgaaaagctaccacaattgcaacagcaagcgcagcaatccactaatcaaatggatattcaacaagttgcagatatgcagcaatttatagatagactagataaacgcatatatgacttacagctttcaagacaaatagctttgcaaactgcgccacaaattcgtatgattcaaaatgttaatcaagcacttgccgagaagatacaaagttcaattttgacaagtattccactatggaaaaatcaaatggccattgcgcttacattaatgagacagcgtaatgcagttgctgcacaacgagctgtcactgatacaactaatgatttattaacagcaaatgctgaaatgttgaaacaaaatgcgattgaaactgcaacagaaaatgagcgtggcattgttgatcttgatacattgaaacgtacacagcgtaacattattgagacaattgaagaaacattaattattcaacaacacggtcgcgaagaacgacaattagctgaaaaagaattacaacaattagaacaagatttaaagtcacatttagtgaacatcaaaggaccgaataaacaatcataaattacgaattagatataacaaaaaagagcttgggacattaagttccttaaagttcttaggcaatgtaaaaaagctgatttctattatttatttgatagaaatcagcttttttgatatgtattttataatgtacagctcgttgagctgctattttccttatattaagtgccattaatacaaaacctagctctcgtttaactttatttattcccgaactgacattcgagtgaaacccaaaatagccttcataaatccaaaaacaggctctacatcaatttttctttgactatagattttttcgtttctggttcagaaagcttttgattaatttgggctttaaagtattcccaattataattcttcataattttcttattggatttcgaatttggcttcatgcattgatgtctcaaagaacatgatgaacagtcatcacattcatatagcttgaagtcacgtttaaaactatatctatcattacggtatgcatatcttttaaaacctattcttttgttattaggacatataaattcatcgaattcgctatcagatatcgtttcaacaatttcattaacatatcgcgtattatcattttgaggaattctaacagaagtttctattggtagtgtaagttgggtcatgttataatttttatacataaggcacctcgttaatttagtttagtagtatttattaaattatacgaagggatccaacacagaaaatttattttattgaattttacatttatgtgcaagttgggcaaagtgtcttatttttttaaagtatttcaaagtaaaattacacgttaatacgtagtattaatggcgagactcctgagggagcagtgccagtcgaagaccgaggctgagacggcaccctaggaaagcgaagccattcaatacgaagtattgtataaatagagaacagcagtaagatattttctaattgaaaattatcttactgctgtttttttagggatttatgtcccaacctcttttatattattcgttattcctgttgatatttaattggatcttgttttacaaatatgccgactagatagcctaatatcgttgcaataattgctactgggaaccactctaaagaatacgctcttagaggcaatgattctataaagttaattttcagccaacctaacttactaataacactgaaaatcgacaatataaatacgataataactggaatttgttgtgaaatgcgttttgtcggtatgaatttggcaattaaaattaataatacaacagttattgctactgggtatacaatgcttaataccggaattgacattgagataacagcatttaaaccttggttagcaataataaaactcattaaaatgaaaactaatacaaatgctttgtatgatactttaggtacgattctatggaaatattcagaaactgcaacaataagcccgcatgctgtagttagacatgccagcgccacaatgatgcccaataaatattttccgaatgaaccaaatcctgttgaagccattgtcgttaataaatatgtcccaatgtttcgatctttggatttcaattgatctaacgtcatgtcacttactggcatatgattaccaatataacctaatgaaatatatatgaaaattaaagctacggctgcaattaaaccagcagtcaaagtttgtttgaatatttgatttgttttagtaatgcctgttagttttactgcattaacaacaatcattgaaaaagcaattgctgcaatggcatccattgttaaatagccttgtgtaaagccttcagcaaaacttgaaaaattagaatgatatagtgcttcattgccctttccagcactattaccgctaaagtctaagtatcctttaataatcatcgctaaaatagtaatcaataataatggtgttaataatgaaccaatacgatcgattaacttagatggatttaaacaaatatacaaaacgactatgaagtagataatcgtaaatataaataaagcgatactactattgctatgtataattggtgtaattgtcatttcaaaagatgtagatgcagttctaggtattgcaaaaagtggtcctatagtcaaataaatgatgattaagaacaatattgaaaatttaggtgaaattttatttaatgcgccaatatatccttctttatcaagtgcacctacaatcacacctaataatggtaaaccaatcccagttagaacaaacgctaaaatggcgggccagaaaaattgaccactatccaatccgagattaggaggaaaaattagattgcctgcgccaaaaaacatagcgaagagcgtaaacccaatgacccatgtatttttattcatagagttactcctttttttaaaacacgaaataatttacaagtaaatattttagcacaaaaaataataaagagtctatatgaaatatgttgtacatagcagaaacaaaacacatgtgttgtttaaatcaaattatgtcagaaaataaaattcttcaaatccactttttaaatagtaactgatgacttttattcacaatttcatataaactcatattttaaatttatttataaagatttaagtagtaatttttttaataatggagagagatgtccaggtaaatgcgcaacaccttcaacgaaaatagcatattgaccataaatattatgaattgtttgttcaacatcttcagttattggatcttgactcaaaaatacattaaatacttcaataccaaatttacgtgacatttctacagcttcatacgtatcaataataccatcttgactataattaaatgcagacggttcgccgtctgaaaatacgattaaaaatcgttgatgttgatttcgacgcattaatcgttcacttgcaactctaatagcaacaccatcacgattatcatcttgaggttcaagtgccataatacgtgggccatctttttcaaaggttgagtaatcatagttaataatttcattaatgatatttggttgtgcatgctcgtctgaatcaaaggcatcctcactgaatgataaaatttcatgtttaatgttcaatgcttttaacgtctcgtggaataacactacacctttcttcgtttcagccattttatcatgcatacttgctgacgcatcaattaacaatgtaaatgtcgcatcaaatgatttacttaaatcttgttttttgtaaaacaatttatattgatcgtcgataaaccaattaattaaatccttttgtaatcgcccttttgttaaattaaaacgtgcatctcgttgttctcgttcaatcgttttctttataatttgaattaagtctttgatttcatattgtacgtcttgtttcgattcttgatattctaaaacatattgtggctcaatttcaggaatttgccattttatttctacatttttgttcacaccatcaagttgaaatgcttggctttgaccaacagcatcgccttcttcacgatttagcgtatcgtttgatcctttgccctttttggtcatcatatcagtcatatcatctgtagcatcgccttcacgtgcttcatcattacctaatgtttcactattttgtccttcgtgaagctccatttctaaataggcgccaccttttgactcactatctgcagatttagagtcagctttttcactttcgttatcatcatcttctgaagtatcatcttgcccatcgacttgacttgcatcagttctctttaaatcatcaaactctggactagctaatgtattatatagtgttttaggtaagtaataatattcgtttagcatatcttcttttaaaatatcatctacttgatacataattctttgagccagatacatattatcttcagaattttgattttggaaaaaattaggtaaatataagaacatatttactaaaatatcatctaaatctgaatgtatagatggtatatcaaagaaatcttggcttaaaaatgcatgttctaaatacaaaaataataaatctgtatattgtgttttagtacgatacactttaatttgagattccgtatatgatatacgtgtatctaagcgaagatcaattaatttagcagtacttgggcgctcaactttaatagaatttaatacgcgcatatcttctaataatttaaaaagttgttgataaaatttagggtgtttaaaagttttatcttgtactacttcatttacaatttgtacatccatcatatgataaccgtaagcagctaacataacatctgtttttaaaccagccatttcgatatggcttggtcgatgtgaccaaaaccaactcgtaatcaaaacattttgaacaggattatagtaagggaatttttggattttaacttgtgtttgttcattttttaataagagtcgagctaagtcttgcaacatcattacttgcttggcatctaactgttcgtcattaaattttatgaaacgatcactcatgttttatccctctttaaaagtttagttctacagcattatatattgcttgttgttcacgttcatcttccaatttatcaataattgtacgtttaattgcacgttcaactggcattacagtgattaaatcacacaagtctaataatgcacggatactagcggcttcttcagaaatttgtccctgcttagacatagtacgtaaatcttcattaaacttaataatttgttcgatttgtttatcatcttgtaataaactttgctctttaatcacattttttaaaatgtccccatcaatataatcaacgtgaataacaacaaagcgattttttagtgcttcattcattggcaaagtaccaacataaccttcatttatcgctgctataacgttaaatcctggtacagctttgattacttcaccagtgtatggattcgtaatttgacgacgataatctaagaccccatttaatacaggcaatgtttcaggtttagccatatttatttcatcaatatataaaatatgcccctctttcatagctttaataactggaccatctacaaagacaatttcttgttgaccttccgcatttgttttaattgttttaaagcctaataagctttctgtatctaaatcaacagaacaattgacttgatgcatgggtgtatcaacaacttcacttaatgtttctgccaactttgttttccctgaacctgttggacctttaagtaaaatatttttatttaaatcaaataatgccttcgcatcattgaaaactgttgaatctgaattcttataatgttttagtgccattttaaaacgttctcctttaaataaattaaaaaactaagacatggaataagttctccaaatgccttagtttactattctattctgatataaaacgcaatgcttagtatgcgaattgtttatattttaccaaatttactaattgaaaatctcatattaggcttcatttcaataattatgcgtttaaacttctttgaaatatgttttatagtaaccgccaactaatccagaattatctattatttgataatattcttcagtttcgttgataacatcatattgtttgccaaccgttaacatgtcagaaactgtaaatttctttgcatctgtattaatgacttctactttcttgattggtgtacgttctttccaagtttcatgtaacataaattttgtcctcgctatcgtaaaaaaattatttttgtaaagtgaatataaacgataatccactgttttcagtaattctaattgattcaatatcatcttgctcaagcgtttgatatggtatttccacttcatctaagcgcgatttcgcttgattaaagaaatctgcatctttcgtttcaaactcaacttgatcgactgcgccatattccggcattgtcatttcggtttctacaggcattaaatgtatttcgccacctagaccacccgttccaactttgaatacttggacatgatagtcagcattgtcgaagggttggtattctgcaaatacttcaagtccgaatatatttgttaaaatttgacctgtaatatctacatgattcactttaagaatcactggtcctaaaccttgcacttgatgtaacggattgaccgcactctcaaaagaaggcatacctaaaccaacgccataattattctcgtttgaatatattgagaaaatatgaccattgttatcttcgagactgaaatatttattgccatttaattctttaactgttgtaaatggaatatccttattcgataatatttccgcatactcctctaaacctgagtcagttggtgtacgtaatccaatacccacaaagtgagattcttctaattgctcacttggaacttgtataaattgaagtcttgttcctgggcttatatctgcatcgccgaaacgaattgagttttcaagaagttcttcataatttaatcctaatatgtcaaccatgaaatgttttgtctgttctatatttgttgtacctaatgttatacttctaagtccacacattatagccacctctatctttatctttactattatattataacttattttaatcataaattatagaatatcggtcagttgattttgattatagattaatatgtgaaaaatgtatttctttaaaagaactatttcatttaaataggtaacataatattgttatggttgctattgagtgtgtcattaatgaatatctgtatatagcaattgaatatttcgttttttgtaggacatgaaaaacatatatatgtcgtgtccataaagcgaatttacatcatgttcagatgattttaaattaactaaaggcgcttatagaattcatatatttcatcgtttgttattatctaaaatgcattcattagcatattgaaacacgctattctacctatatttctattgtgagtctatttcaatagaaatgatatattttttaagtagtcaaaattaaacccacattttaatacgaatcattataaaaataaagtacagcagtaagatatttcgactaggaaataatcttactgctgtttgttattgatttaatcccgcttttaggaatagtaaactattttgtgttgtggattaagattctaataataagtcttctgggttttcaattaattctttaattgtttttaagaatccaactgcttctttaccgtcaataattctatgatcatagcttaatgcaatatacatcattggacgattttcgattgtatcttgatcaatcgcaattggtcttgtaataattgaatgcatgcctaagattgcagcttgattaccattgataattggcgtactcatcattgatccaaaaataccgccatttgtaatcgtaaatgaaccattaaccatatcatctaagccaagttttttctctcgtgctttaactgctaaattagcaatttctgcttcgatttctgcaaaattctttttatcacaatctcttacaaatggtactaataatccatcatctgtagaaacagctacaccaatatcataatattgtttcgtaatcatgtcgtcgccgtcgatttctgcattaacttctggatactttttcaaagctgctacagaagctttagtaaagaatgacataaatcctaatttagtaccatcatgatctttcataaattgttctttcttacgtttacgcaattccataacatttgtcatgtcaacttcgttaaatgttgttaacatagctgtattattagatacctctaataattttttggcagctgttttctttctacgtgacattttttcacgaatcactggttttgtaggatattgattgtattttttctcttcttttgcagatgcttgttgtgttgtttgtgttgatgccggtgcctgttgtttcttatcaatatcttctttacgaaccacatcatttgttttcggacttacttcagcaagattcacaccattttcacgagcatatcgacgcgcagaaggcgtagcattaatacgttgctgattgtcatcatttgcttgatttacttcagctttatctaccgaattatttgttgtttcttcttttttattatttgtttcttcattttgttgtggagtattgtcgttactattttctttagaagcattgccactaccttcgccgatgatagcaattgcttgtccaacttctacagtgtcgccttcacttgcaagttgttcagataatacacctgcttcttcagatacaacttcgacattaactttatcagtttctaattcaagaatagcttcacctttttctacgctatcccctacgtttttcaaccattctgcaatggtaccttctgtaatagattctgctaattctggaactttaacctctggcatgacttatttccccctagttattttttaatgcattttctataattttattttgaacaagtttatgaatttctccatcgccttcagctggagcagccctttgaattctgccatgataacttaaatcatatttatctgcaactagcactttaacatatggatagacatataaccatgcaccttgatttttaggttcttcttgtacccatgacacttcttcaaggtttggcaattgtgctagtaatgcttcaatctcttcctctgggaatggatacaatctttcaatcgcaacgagtaatactgattcgtctggatttttagctaatgcttcttttaaatcaatgaacattttaccagttgccaaaataacttttgtaaccttatccgcttgatatgattctgtcaaaattggctcaaatccaccagaagtaaattcatcaattggttttgcaactgttttatttctcagtaagctttttggtgacataacaaccaatggtcgcatttgttcagaatctaaactagccgcttgtgcacgcaataagtggaaataattacttgaactagataagttgacaactgtgcaattattttcagcagctaattgtaaaaatcgctctaatcttgctgatgaatgttcaggcccttgaccctcatatgcatgaggtaagaataatgttaatcctgaacgttctccccattttgagcgagaactgaataagaagttgtcaaaaatcatttgtgacatatttgcaaaatcaccatattgtgcttcccaaatattgaagctttttttgttttccacattatagccgtattcaaaaccaactactgctgcttctgaaagcggagaattgtgtatatcaaatgtcgctttttgatcaggaacatgatgtaaaggtgtatatgtttcacctgtttgctcatcatgtaacacggcatgcctatgactgaatgtaccacgttcactatcttgaccagttaagcgaatcggtgtaccatcttgtaaaattgtcgcaaatgcaagttgttctgcttgtgcccaatcaactaaaccatcttctttattaaacggctcatgacgcttctcaagaactttgtttaactttttcaaaatgttaaagccatccggatatgttaacaatgcatcatttatttctttcaagtgatcaaaagtaaatgattgttcgtctgcttgtaacggtaatgcaagatctgcaggcttttccatatctggattatccattttatcagctttattaattttatcatgagcttgtcttagttccttttggacttgttctataaatgaatgcatttcatcttctgaaatgacaccttcattaacaagctttttaccaaacacatattcaacagagtcatgtttgcgaatattctgataaggaactggattagtaattgatggttcatccatttcgttatgtccgaaacgacgataacctactaaatcaataacgacgtctttatgaaactcttttctaaattccattgcaatatcaattgcttcaatagtagcttcaacgtcatctgcattgacatggaatattggcacatcataacctttggccacatctgtagaataagttgttgaacgtgcatcaattggttctgtagtaaatccaattctattgttagtaataatatgcaatgaaccacccgtagaatagcctttcaagtttcctaagttcattgtttcgaagttaattccttgaccaggataagcagcatcgccatgtataataattggcattgctttatgatgatcagtcgtcggagccccagctcgttgtgtatcatcttgtgctgctctcgtacgcccctcaacaacaggtgcaacaatttccaagtgacttggattgttagccagtgcaatacgctgcattgtaccgtatgaatcagtagttttaatgccaccaaggtgatatttcacatcaccagtccatccagcagttaactgcaagctaccatcttcaggtaagaatttcattggatctgtatgcataaattctgaaatcatcatttcgtacggtttttctaagacatgcgttaaaacgtttaaacgtccacggtgagccatgcctatttgtatatttttaataccttctttcgcagcaatcgtaatagtacgttgtaacatcggtacaagtgcgtctaccccttcaattgaaaaacgctttgcaccaacgaagtttttatgaagatatttttcaaacccttcaacatacgctaattgtttgaatagtgcccttttttcgttattatttaacgttactttatatggcgtttcaattcttctttttaaccaaccacgttcggtattgttattaatatgtgtatactcaaatgcaattggtcctttgtaacgtttttccattcttaaaattgcttcataagcattatcataaatgtcggcaaagtgatctgaaacaattcctgctgatataccttccaaagtctgttgatctaaatcaaagtcttcaatctctaatttaggtacatgtttcctttttggaggatttacaggataaatatcggctttaagatgcccgtattggcgaatattatcaattaaacgcatgacacgcttaattgtgccgtcgctattttgactacttgtactttttaaagctggtacaattgagtcatcattcttaattgtgctgaataagacttgtaaatcttctggtacagatgatggatcttgtaaaaagtcatcatatagatctaacattagacctaaattcgcaccgaagtttacaggagcctctgaaacttcttttctttcgttagtcattttacaccctccacaaaaatgttgaaacgcttacaatgtaataatatcactatttagttatttgttaaagtagatttacctatttatctgctaaaaagaagaatcaacaaaagcgttgattcttctaggtttatagatgtattttattgtaaattttgggagtacaacagaaatgataaagaaccactgtttatttgttttatagttgttcttatacattagtcacagctaatgtgtacttaaaaaattgatcctatgactttgattgacgtctcagtcatgattaaaatatgattttaaacgttgttcctttgttaatttcacttttaattttaatcgatcctccgtttaattgaatgattttttgagcaatagataatccgagtccattaccgccttgacttcttgaacgagatttatccactcgataaaagcgatcaaaaatgaaatcttgatcttcctctggaataccaattccatgatctgtaatttcaattattttttgcttattttttaaccttgtcttaactttaattttcttattcttcacatcatatttgattgcattatcaataaagattaaaaataattgttcgaattgatgaggtttcattttaatttctagatttttagatgtcagatccgtatcaaattgataatcaggatgcaattgttttaatgagtgtattcgcgagcgaatttcatcattaatatgcacggtctgtgcttcagaagaaatgtcatttacatctcctttagtcaattcaagtaattcttcgactaattttatgatacgattcatttcttcaatagaaatatttaacgattcttctaatactgctgggtctttttttccccatcgctgaatcaaatttaaatgaccttgaataatttgtaatggtgttcgtaattcatgtgacgcatcttcaacaaattgtctttgttgattaaatgattcttcaatttggctcatcatctcattaaacgtatttgctaaattatctatttcttcataatttgtatttaattgcaatttattttgaaaaccatctcgtcgaatctcaatcattttatttgataaactgacaagcggtttagtaatttgtgttgaaaatacataactgattgtggcagttataattgttgcaatcactccaaatgccagcgcaatgatatacaatgattttacgatgttatcataattttctagtgaatgaattaacaagctataccctttgaaatcttgcgttgtaattggttctttaataattaaatattcaatgcctttatagcgtttttttattacgcggtcaaaataacggtgttcataacctggttcaactctcactgtgttatcattcgatgtctcaaataatttattattatgctcatcataaataattatctcttgaaaattacctaaagatgcattcaagtctaatgcagatatatctttaacaggcttagaatgaaataaattattaatatcgcttgagcttcgttctgcatcatcaagctcactattatgcagtgtatctttcaagaaaaaaataataattaaacaaaacaaaaatatcgtgacaaacgtaatcatcgtggtaacaataatccagttattgcgcaatttacgttttgtcatcgtatcacatacccaacgccacgaactgtttcaatcattttgtcacgatcgtatggttttaacttgtttcgtaaatatcttatataaacatctacgacatttgtttctacttcactattataaccccatacatgatttaaaatttgttcccgttgcataacatggtttttattttcagctagaagatatagtaaatcatactctgtttttgttaattcaatttctgcgccatttaccgtcactttaaaagcgttcttatcaattgtaataccgttgacatcgataatatccttttgtggctgacgacgtaaaattgcacgaattcttgctaaaagttcttcaatatcaaacggcttaactatataatcgtctgcaccgtaatcaagcccagcaactttgtcatacgtatcacttttcgctgtaattataatgataggtgtagattgttgttgtctaattttgcgacaaatttctaagccattaattgacggcaacattaaatctaatatgattaaatcatagtaatggctaagcgctttatctaaaccgtcttgtccatcatactctgtgtccacattgtaattttcatgtgtgagttccaattcaagaaatcttgctaagttttgttcatcttctactattaaaatttgcgtcatttgtacacctcatattacgactttttctaataaggtaatatattttaaattttgtatttttctatacaatagttgctttttaaattagtttgtttacgtttaaattttatcacaaatcaataaccatgttttaaatttttcaagctacaatcattaattatttattaactcaaatatttaataatcagttaatggcattctgttaattctgattgcagtacttaaatatagaatactgtaacacaaggccttaccgcaatattaattgttgtcatatactgacttttcactattgtaaaatgaatagttattatctttattttcacaaaatgaccgtagtttaaacatttcacacatcatttcaatgtgcgattttgaacttggaagtaacatttcataatgtatgaattcaaaaggagtatgtaaacaatataatgtttaaacctcatcacttttaaatattctaattctaatgagaaatacaaatttttttattttctaaaatagcgtaatcatgcgttttatttactattcttaaaaaatattcaaaaaaagttttagtttctaattgacaatgattctcactaatgtataatagtagttgaaaatgattatcaataccacatagaacatcccccccacaacgtttcgttcttgttggattggtcattttcaaatattccccttttatatgcccgtaaaagacaatatacgttataacaacgttttataaaagcagtaaacccttacgacactttaggtttactgcttttgtttttttactatttaatttattaatttatttctaagtaataacgttgataaaataatgcaaaataatccaccaataatgccggcaataatatctgttggataatgtacacctagatatacacgtgatatggaaatcaataaaatcatagctgcacataaccctataagaataccttttgaattaccttgatttaatcgatttaatagatagataccacttccaaaatatgcagttgatcccatagcatgaccgctaggaaaactaaatcctgttatatcaattaaacgcagcaatgtaggtctttctctatcgaatatattttttaatgctggattcaaaattccagataatgccattgttaatgcaaaaaataatgcttcaattttgtggcgctttaacatgagatatgccacaagaagtaatgaaatacataacattgcccagacttcacctactttagtagccccaagcatgatagatgtcgtaataaagctctctgatgaatatacaaactcataaacttcattatcaatccatttcccaagtcttgattcgtggaaaaacgcgataattccaaaaaccaatgtaaaaacgatgagcaaagagatacgtttccattgactcataaagcattaccccccattaattcaatgcgtctttaatcatcttatcaaataaagcttctttcgtataactttgttcatacgatttcatattattgataattcgagttctttcctgttccatttcatttagttcttgtaataaaatttgtgctgttaattgttcttcatcaatcgctttagcatatcctttatcagcaaaatgatttgcattgtcaatttggtcgcctcgggattgatctaaacctaatggtactaataacattggtatacgtaatgttaagaactcataaatcgcatttgatccagctctacttattactgtatccgtaattgctaataaatctgttaaatcctctttaacaaattcatattgtatatatcctgattttttaacttgagcatcttttaatcctttaccagttaaatgtatcacttgatattgttgtaataatgcatctaagttttcgcgaataatgctatttaattttttacttcctaagcttccacccataacgagtaaaacttttttattttcattaaagcctgttaattgataaccattatgtgcattaccattttttaaatcttctcgaattgttgctccaataaaatcagctttctctttaggtaagtagtttagcgtttcttcaaatgttgtatatattttcttggcaaatttaagtgctatcttattcgctaatcctggtgttaagtcagattcatgaataatagttggtatatttaatgatttggctgcaataacaacaggcacagatacaaatccaccttttgaaaataatagatcaggtttttcttttttcaaaactttacgagcatcaagaatacctttcaatactttaaatacgtctttggcattttctaaagaaatatatcttcttaatttaccactcgaaataggataatacttaatttctggtagttgtgattcaatcatttctctttcaataccatttttagaaccaatataaagcgcttcataaccttgtgataatgcagttggaattaaacttaaatttactgatacgtgtccaactgttccccctccggtaaatgcgattttcgtcattaatattacctctattcttttaaatttttataatatgcataaaatggttcacctttatcatatggcggatattccattaattgttcaccgaccttatgaaatccaaatttggcaaataaaccttgtgcaggtttgtttaacgcaaaggtgtccgttaaaataacttctgcaccacgtgctttaactacatcaataacataattgaataattctgtagcagctcctttatattctttcgaaccagttaatcgatgaataacaaaggcgccttctctatttactggccagtcaatgtcatcataccattctgcttggtcttggtcgacaacaataaagccataaattttgtcattttcctctaatacgtacaaataatctttagcaatatcttcttcaaaatgttctaaaagtgggtactgatcgtcccattgctcgttgtcgtgttctttcattaattcttttgcttcttctactagatttaagatttgatctaaatctgacattttacctagacggatcatgtacgtcactccttatatcattatgttaaacatgtttttcagtacatgttaatcttacacactattaacatgctttaaacctttattatgaatgaaaaatagtaattatcacactatgggataaaaataaccaataaaagtatcatataccaattaattgattgttaaaactagtgaataatactatttaaaaagtatatgctcattgcatattaaaccatgaattgttatcagcgatgatagaaattgcgttatttacatcatttgtaaatgtctaatttatatcttttagagttagacgtcaataaaaataaacacgcctcctaaattgctatctttgcaaatttaggaggcgtgtcattaacataataataatacaattttagtagtgtgtatcgcttattttaaaatattaatcaacttatcgagaacatcatcatgtttattagctttttcaactaataactcagtaaatttattattcgtttctttattaaattcaccagttacctcaagtttattcgcttgttggaaagctttaacttgattttctaaagctttatcaaattgcgttgattcattatcaactttataacctaaagctgataaaccaattttaatagttttaatatttttatcatcgtctccaactttaaatgttttcgtattaggaatgacatttaaagattgatatttaggtgtgtcaatagtaacgtctggtttaatgcctttaccgtgaatataatgaccatctggcgttaaccatttcatttcagtatattttaacaatgaaccatccttaaactctcttgtagtttgtacgacacctttgccgaatgtttttgacccataaactttagctttattatagtcttttagcgcaccagtaaacacttcagaagcgctagctgaaccttcattcactaagatggatatatccatgtctttcgcttcttttaacgcatcattagaagtttgaattgcttcagtatctttacctttttctagtttaacaacagtttttcctttatcgataaaaatatttgccattttaacagcttcatctagtagtccacctggattatttcttaaatctaaaacaatctttttcaaaccatctttgtgagcttttagaactgcatctttcaattcacctgatgtatcattctggaatttattaatagtaataactccaactttaccttttttcttatactcaacacttttaacatgaattttttcacgtttaatcttaacgtctttttcttcactacctcgttgaacagttaaagtgacttcagtgttttctttaccacgaacatctttgacaacttcatctaatgctttacctttaattgattttccatttactttagtaatgacatctttaggacgaatgccagcacgttctgctggagatcccttcataggactagtaaccataatttgatcatttttcttttgcatttctgcaccaatacctacaaaatcacctgaaacaccttcattaaaggatttcgtttgttcttttgttaaatattcagaataaggatcttttaattctttgaccatgccatcaattgcagctttacttaacttgtcagagtcctgttttttgtaataatcactatttaagattttatacacattttcaattttatttaagtttgcttgatcagttttgtttaaaccacttattttttgatttataaaaatatatgcaacaactgtgatgacagctgttattaggattgtaccaattaatattgatatgaattgccaacgttttaagtgaacgcgtttcgatgaattagtttcttggtcttgattgcttgttgcaatttcagcgcgttcatcatcggatgaagatgtgtgttgcttatcatccattgtatcacttccttattatgtattatgtacttttaaattctgtgtagttaatcatatcaatttatgcaagatagcgcaccatatttcactataattgattaatttttagtcacaacttagtttattttaaattaaaaccaggataacgaattgcatcaccctggttctaactattattattaaaaattatattaaaattttagccattccgtatattcttcatataaatcatcaaatacagacattggcaatgtgaaatcaccatgtgtctcaatataatcagacagtatgttaaaatcatcatcgtgttttgggaaagcaagatcgtcaaatatctcttctgctagacgacctttatcgtcgtgtcgaccacgaactgtcatgacaaattgataaaacgaatagtttttcattagttcattgtcacatcaatcacttttgtttcacctttaatcacagcattttcatcataaatattaattgaagctgcttgatcagtgttagtaattataattggtgaaattacagatttagcgttattattaatatattcaaggttgaatcttactaatggatctccgacgttaacttcgtcaccactagacactaacacttcaaatccttcaccgtctaattgaactgtgtctaaaccgatatgaactaataattctaatccgttatctgcttttaacccaatcgcatgcttagttggaaagacattgtcaacacgtcctgcaattggagacacaacttctccttcagttggattaataccaaaaccttcgcccatcattttttgtgcgaatacaggatctggaatatcttcaattttcacgaattctccagttaatggtgcataaattgcgatatctttctgaacttctttgccttttccgaataattttttaaacatactttccactcctacttatcaaaatgtgatattaaatcgccataacccaattcttctaacttttcatatggaataaattgaattgcagcggaattgatacagtatcttaagccgccactttctttaggtccatcattaaagacatgtcctaaatgactatttgattcttctgaacgcacttcagttctcaacataccaaatgatttgtcgactaattctataatttcatcgtcatcaagcgctttggaaaagctaggccatccacattcagaatgaaacttttcttcagatgtaaataaaggtttaccagaaattttatctacataaattcctttagcaaaatgattccaatattcattcataaatggtggttcagtgccgttttcttgtgtaacaatatattctatatctgttagttcacttttatcttttttaagcattttgattcccccaatgtgattctataaacgcttttctacctgaaccacgttgatattggtaataatgtaccgggttctttttgtaataatcttgatggtagtcttcagctggatagaaatttttatatggtttaataggtgtaatcactggtttcttgaaaataccttgttcatttaattgttgctttttaaactcagcagcctttttctgatgttcatcatgatagaaaatgactggttgatagctttcgcctctatcgaaaaattgcccttgatcatcagttgggtcaaatgttttgaaatatatgtctaatatattttcaaaggaagtaacctctggatcaaacgtaatttgtactgcttcgacatggccggtttgattcgtacatacctgttcataagttgggttgtcaacatgaccgccactataaccagatacgactgacttgatgcctggatatgatgtaaatggtttaaccatgcaccagaaacatcctcctgctaatgttgcatattcttttgtcatatgaattacctcctctatctatctaattataaatttagtctataaaggattgaaatggaagtaattaacactgaaaagattaaatttacttcttaaggactacgaggccaatcgcaccttgaccagtatgtgcagaaataactggtgtagttacatttatatcgtaattattcacatgaaaagcttcattaaaaactttcttcaatttatcaacatattcaatgacgttagcatgtgcgacaccaatggatttgatttcatgatctcctataaattcagcaatttcctttttcaagtattggatactagaattttgagttctcgcattgtgcacaagctctaagcgaccatcatctagtgtaccaattggtttaattttcataagattaccaatcaaaccttttgttttactaattctgccacctttaattaattgattcaattgccctataactacaaataatttaatgttttctcttaaatgatttaactttttaactatttcagaagttgagacaccttcttttacaagctctactaggtgttgtatttgataccctaaaccaaaagaaatagattttgaatcaataacagttacattagcatctaccatttgacttgcttggtaagcagtgttatatgtaccacttaatcctgaagaaagatgaatacttatgatttcagagccatcttttcctagttcttcataagcagatataaattcacctatggctggctgacttgtctttacatcttcatcattttcaatatgattaataaattcttctgatgtaatatctacttggtcaacgtatgaagctccttcaatagttaaacttaaaggaattacatgaatgttgtttgcttctaagtattctttagataaatcggatgttgagtctgttactataatctgttttgtcatggtcgttttcccccttattttttacgaattaaatgtagaaaggtatgtggaattgtatttttctcatctagtttaccttcaactgaagaggcaacttcccagtcttcaaatgtataaggtggaaagaacgtatcaccacggaatttaccttcaataacagtaatatacatgtcgtccactttatcaatcatttcttcaaataatgtttgccctccaaatatgaaaacatggcccggtagttggtaaatatcttcaatagagtgaattacatcaacgccctctacgttgaaacttgtatctgaagtaagtacaacatttcgacgattcggtagtggtttaccaatcgattcaaatgtcttacgacccattactaaagtatgacctgttgataattttttaacatgcttcaaatcatttggtaggtgccaaggtaattgattttcaaaaccaattactcgttgcaagtcatgtgcaactagaatggataaagtcataattatcctccttcttctatcatttcattttttattactaagttatctttaatttaacacaatttttatcataaagtgtgatagaaataatgattttgcataatttatgaaaacgtttaacacaaaaaagtacttttttgcacttgaaaatactatgatgtcattttgatgtctatatggttagctaactatgcaatgactacactgctattggagcttttattgctggatgtgattcatagtcaacaatttccaaatcttcataatttatgtcgaaaatagacttgtcactgttaatttttaatgttggaggattgaagctttcacgtgctaattgtgtttgaatcgcatcaatatgatttgaataaatatgtgcatctccaaatgtatgcacaaattcacccacttcaagtccacattctttggcaataaggtgtgtcaataaagcgtagcttgcgatattaaatggcacacctaaaaagatatctgcgctacgttggtataactggcaacttaacttaccatcttggacataaaactggaacatggtatgacaaggcggaagtgccattgtatcaatttctgttggattccatgcagatacgatgtgtcgccttgaatctggattatgcttaatttgttcaattactgttttaagttgatcaaaatgattaccatctttatcaacccaatctcgccattgtttaccataaacatttcctaaatccccgaattgcttcgcaaatgtatcatcttcaagaatacgttgcttaaattgtttcatttgttctttatattgttcgttaaattcaggatcactcaatgcacgatgcccgaaatctgtcatatctggacctttatactcgtctgatttgatataattttcaaaagcccattcgttccatatattattattatattttaataagtattggatgtttgtatctcctttaatgaaccataataattcggttgctactaatttaaaagaaactttctttgtcgttaatagtggaaatcctttagataagtcaaagcgaagttgatgaccaaatttcgaaatcgtacctgtatttgtgcgatcatttcgtgtatttcctatttctaaaacttcttcacaaagactgtgatatgctgcatcaaatgaattcaacatatgcgataacacctcattttcattatttatagtatgtatatttagtttgatataacttaactttatgtagcattttgttatcactcattttaggaatatgatattaatatcatgaattccgttactttatttataaaatgctgattaagtacctaccccatcgtaacgtgatatatgtttccaattggtaattgtttacccaaatctataactttaatgctaaaaaattttaaaaaagaggttaacacatgatttgaatattatgtttgatgtcctattaaaacagttaaatttctagaaaatatagttggtaaaaacggactttatttaacaaatagaatacaactatattctctattttcaatgacagacaccatttttaatattataaaatgtgttaacctttatatttatttatgtgtactatttacaattttcgtcaaaggcatcctttaagtccattgcaatgtcattaatatctctaccttcgataaattctctaggcataaaataaactaaatcttgacctttgaataaagcatacgaaggactagatggtgcttgctgaatgaattctcgcattgtagcagttgcttctttatcttgcccagcaaaaactgtaactgtatttgtaggtctatgttcattttgtgttgcaactgctactgcagctggtcttgctaatccagctgcacagccgcatgtagagttaataactacaaaagtagtgtcatcagcatttacttggttcatatactccgatactgcttcgctcgtttctaaacttgtaaaaccattttgagttaattcgccacgcatttgttgcgcaatttctttcatataagcatcatatgcattcatatttaattcctccaattaaattgttctgtttgccatttgtttccatactgaaccaagtgcttcatctccgttttcaatacgagatatggccatttcaatttgtaatttaacttcaaacgcattgtcattaatatgggcttttagtgcgggaagctgctctgcattaccttcatcaaagataaacatagcagcacgccacctaacgattttctgtggatcatctaatagtagcaccatttctggtagtgcctctggataccctaaatcgcttatgcaatcccctgctgttcttcttacagcaggacttttatcacgaagccccttatataaatacggtaaaatttctttactttcaatcatacctaataatacaatcgcttgacgtctaaccggtactttttcatcagataaagctaaatcaagcagcggtatatcttcaaaagtcggctttggaaaatggtttaacattcgtaatcgagtcttccaattatcagttgcatgatattcatccaaagagacatgtcgatagaaatgataattattagttgcgtgattttcttctaaagcatgttttaccaatacgggtaactgtgattctggataggtagctagcacttcttctaggacaccatccattacttcttgaatatttccatagcgatttcctaaatctagccatttacgcataaaaacaatattgtcatgtgctgtttgcgcttgagtcatatggtcaacatatgtttgtggtaattgttctcttaattcttggtcagcagaagttagcttaatttgatacggtatacccttaaaagttaataattcagctttaatttcaccaaaatgattgtcaatttgaggttcatttacagattctaaaaccttattcgcatcagaaaaagcagctttaatatcaggtaatatgacttcccaatcagcttttggtgccttatcaacagctaagaagttcatgacatgaaaaatggaagtgataccatctatagataacaactgatttataaatcttggttgtgtttcttctacttttttataagtattagataacttgtcttctcttgtatatgacaaaacaactttcattgtatttggacttggtgttggctctatacgtaaaatttccatatactttattccccccgaatactagttgatgaaaaatttattcgaatacagcctctacttttggcaatactgtttcccaatttgcgtcattttctttatctactgaaataaagtccataacatggaaaattgatttaacgccttcaacctttaagatgtcattaataaatgctggctgtgaatcatcaactttagtatacgtatctgatgtcataccttctctgctttcactaagtgtaatcttcattgtgttgtggttcggtgtttctgatatagatataattttcatttgacttcctcctattgaagttcatttcctaattgttttatttctttccctattgaacactcattgatacaaaaatgatgcgccttcgttttcccctctaatttacgcagacgagttttgattggacattgattgcaataagtattcattaaatcatctattttcgcgagtgcattttgctctgaaaaagttaaaatacgcgacacttcctttattacttcaaaatattgcaaccttgtaaataagtgttactgttttaaatttgacataaaaatattataacatttttgaccctaagatttgaatgaaaccttttataattctatacgtaaaatgtatttatattcaaatgctattgcatcgcaaacgatttttcagtaaaatgagttagttatttattgagcggtttctaaacacccgcatgatcaaaatttaggaggacattttaatatgtataatgaaattttaggactagttacgtttattgcaacgttcgtgcttatggtacttatgtatcgcttttttggtaaacaaggtttaattgcatgggttgcaattggcacaatcattgccaacatacaagtgattaaaactgtagaaatctttggtatttcagcaactttaggtaatgtcatgtttgcttctatttatttagcaacagatatattaaacgatatttatgggcgtagagttgcaaaaagagcagtttggttaggcttttcatcaacattaattatgattattgttatgcaattgtcattacattttattcctgcaccagaagatatggcacaaaaagcattacacgcaatctttgatgttgtgccacgcattgctttaggctcaatcgtcgcatatattattggtcaacatattgatgtatttatcttttcactaattaaaaaagtatttagttctgataaaacgtttttcatccgtgcatatggtagtacatttttaagctcaataattgatacagctttatttgtagctatcgcatttatcggaagtttacctggtacagttgtatttgaaatatttattacaacgtacgtattaaaattagcttcaacagttttcaatgtaccatttggatatattgctaaatcattttatcgtaaaggtaagattgataagttagatcaaggctattaacgcacttactacacaaaagaataagttttaagggagtgggacagaaataatattttcgcaaaatttatttcgtcgtcccaccccaacttgcattgtctgtagaaattgggaatccaatttctctttgttggggcccatcccaaacttgcacattattgtaagctgacttttcgtcatcttctgtgttgggacccacaccccaactcgcattgcctgtagaatttcttttcgaaattctctgtgttggggcccctgactagaattgaaaaaagcttgttacaagcgcattttcgttcagtcaactactgccaatataacatcgtagagcatagaacattgatttatgtcccagcctgaagatgatttttttaggaagtatattacagtactacgtattagaaaatcatctttgaatcagcgagtattttaaacacgtgttacttatttaagtgatgcgtgttttttaatggattacccaacatattttgtattacagtaatagtaactttaactaagtattgaatagaaagtaggtttattatggcgaaaataaattttgatgctgcgacgaaaggaaatccaggcataagtacatgtgccattgtaatcaaagaagatgagcagcattatacatatacacatgagttaggcgaaatggataaccacactgcagaatgggctgcatgtatttatgcactagaacatgcacgtgaattaaatgttcaaaacgcactattatatacagactcaaagctaattgcagatagcattgaagctggttatgtgaaaaacgcaaatttcaaaccttattttgatcaaatagaaatatttgaaaaagattttgatttattatttgttaaatggataccgagagaacaaaacaaagaagcgaatcaacacgctcaacaggcattgtataaattaattaaaaagaataaataaaaggagcaccgactgatgtgatgtcaatcggtgctcctctatttatcaaagaaacaaattattttttatttttcttagctttctttttcttctttttagctgctacctttttagaagtattttttgatgctgactttttgtctttggattggttatctttttgatttttctttttagccaataataaaggaacgtcctcatctttagattcaatactagttgttgtttcaacatcttcctctttatctttgcgtcgttttgcgaataagagtggtgaatgttcgttatctttcaacactttttcatctgtgttttcatttgtaacttccacatcttcttcatcttctttacgacgacgttttggtaagaagaacggcgtatgtttaactttatcgagtgactcgccattatttagcgaatctttttcttcaacagtaacatcttcttcatcttcttttctgcgacgtttcgcaaataaaagtggtaaatgttttgtatcgtctaaagtctcttttattgaatctttattattatctcttatttctaattcttcctcttcatcttctttacgacgacgtttggcaatgaagaaccagaaactagctagtaaaccagagatacccaccacaccaatagcgtttttaataacattaccgaaattattactaaagtgacgcatatgaagtggatcaatgtcatcatcttcatcaagtttctttttatgtccaatagtcgaactgttaaatggatgatttgcagttccataaccaattgttaaatggctattagattcatttccagtacttgacgattgtttagcacgatcagatgttacaatttgtactgctgaaattcgagcaataccattgttcaatgcagcctcaacttgctgtaatgtatgcgcattattaatatctctaattgtttcaagcacaatttcgttaatttgattcattgctgcttgtttttcatcagctgtgccaatttcactatttcgaatactatttattttttcatttgaaaagtctttaattctactaatagcttcttgcttgcgtttagctagttcttttgctgttggattagctgctttcatttgagctttaaattgttccaattgctcacttatttcatcgatgctttgcgcacgttgaatcgcttgaattgcttgttcttttaattgatttaacttagcaatagcttcttgcttctctttatctgttagatcagtacgagctttgatttcatcaatcatatgttgaattgcatcttcaatcgatttaattgcatttgattttgcttgttcaatcgtaaattgttctggattaaattgttcaatatgcgcttgttcttgttgttgaatttcttcaactgaatgaacatcaggtgcattgttaacatgatcaattgcttgttgtttaagcttattaacttctgcaattgcagcttctttttgttccagtgttaatgtcacactattattgatttcattaatcttttgttgtgccgcattttcgattgattcaattgcctgttgtttgactactgacaattctttttctacaacttttacaggaacattaacaatcacttttgatccatcaagcaatgtaacttcaacttttgctgttaagctatcagaaatcgttgcagttgatggtgtatcgatgacttctgctgaaagctgatcaattaagtttatgtgtgcaagaatatcttgttctgtaatgatgtcatcacgatgtacaatgagttcaccattaactaggatttgctcaggtgttgcttcaaaaatttcatttacagcaggttgttcatcaacctcccatacatgtgtatttctaatgtcatctaaacctaagtttaatcctcgatttaattgatctatagtttgagcattctcaacgttttgtagtgctcgtttttcagcttcgtcaatttctttgagcgcttttgctttttgctcaggtgttaaatctggatttgaattgatttgatcacgcttcgcattagctaaggcttttattgcatttttcgcatcttctttagctttcactaaatctttgatgtcttgcaatgcttgtgcaagttgtgcttttgcctgctcaatttcttctttagtcagcgcattgttaatgtcgttatgaccttgttgaagtatttgattaattcgatctttaagtgcttgtttttccttatctgttagatttggattttgatcgatttcgtcaattaaagcttgtacacgtttatcaatatcatttttcgcatcttctttagctttcactaaatctttgatgtcttgcaatgcttgcgctaaacgttcttttgcttgttcaattgcttcttttgtcatcgcattgttaatgtcgttatgaccttgttgaagtatttgattaatacgatctttaagtgcttgtttttccttatctgttagatttggattttgatcgatttcgtcaattaaagcttgaacttgtttatcaacatcttgtttcgcatcttctttagctttcactaaatctttgatgtcttgtaatgcttgcgcaagttgtgctttggcttgttcaatttcttctttagtcatcgcattgttaatgccgttatgaccttgttgaagtatttgattaatacgatctttaagtgcttgtttttccttatctgttagatttggatttcgatcaatttcgtcaattaatgcttgaacttgcttatcaacgtctttattggcatcaatttttgcttttggtatttcattggcatgcacttgttcaatcgcgtggttgcctgctgtttgaacttgagatacagcctgattacttgttgctttattaatgttgttgatgatgctgtttgccaattcttctgctttatttttcgcaataagcttgtcttgatccgtcgcatttgaagcttcgatttcttttagcttattagctaaagcttgattaatagattgaattgccttgtctttagcatcttgtagtcgttgatcaccattaagattatggattgcatcattgactgcttggattgcgccattgatatcattcacatttgtgttatcactatttagcaatgtatttgctagacgtttggcatcatcgaagtttgttttagcattatcgtcagcgttttggtaattgacagtttgctctgcatttggaatttcattgtcaactaaatgtttcaatgtttccattgcatcatttaagtcaatttgattattaacaatatctgttacatctgatacagtatcggcattgttaattgctttatgtgcaagatcttgttgctgttgatttaatccatttaacgaattaacaaacgcatttgctttatctttggcatttgcaaggttttggtctccatttaatgcattttgagcatcgataatattttgtttcaattgctctgcttcagcttttgcaattgcattaccttgcactttatctaactcatgtgctgcattcgcaattgcattatcataatttgctttcaaattgtcatctgcattgatgtaatttgtgctgctgataacaccaaggtgctgttcgtcaatatattgttgtactgaacccattgcattatctaatttagttgctctattaattgctcgagatgctttatttagcgtttcagcattattaatttgttggattgctaattgtctttgagcattgtttagatgtgttaattgatccaatctttgtaatgcttcagctttacgattattaagtctttcttcaccatttaatgctttcttagctgcagtgactgcatcatttaatttgataacttgttttgcagttaagttttgaccagtcgatttatcaagtgcttgtttcgctttatcaaccgtttcatcatatacttgtttgacttgtgtatctgcattgacatagttcgtgctacctttcgtgcgtccttcattgtcagtgatttcttgtgacaattgatccattgcacgattaagtgccttagcctcatctacaatttgttggatttgatttaaatcgtttgattgatcgatgcgacctttaaatccatcttgttgagcattgtttaatgcattcaattggtcgatgtcatgtttaccatttgttttagcaagtgctacacgttcatcaccatttaatgcttgttttgcatttaaaatattttgaagtgcttgatccacttgttgcttattcgcattttgtttcaatacattttcagcatcagcaatagcttgtttataagcattttgtttatctgaatctgcttgtgtgtaatctacagtttgctcaacgttagcatgttcattaactgcttgttgtaattgatccatagattgattcaattgcgttgcttgatctactaattcagcaattggttgaagtttcgtcgcttgatcaatgttttgtttagcagttgcaatttgatcagcatttaaatgtgttaattggtcaatagtttgtttcgcttgtgttttagcttcagcgactctctcattaccatttaactcattttctttttcttgaagcttagttaatacttggtctacagcgtctttattcgcatttgaaccattagttggatctgtaatgctttctgcagcttgtaacgcttgatctactgcttcttttttatcagttgacgcttcagtgtaatttggttgagccttatctgtattcacttgatcaactttatttttcaatgtttccatcgcgtgatcaagttcagtagcagtttgaacatgttgtgcaacctctgttcttgtaggcgctgcatttatagcatcagttaatgcttgttgttgtgcatgatttaagtttggcaatgcatttacagttgttactgcttgttgttgatcacgagcaagtttttgatcaccatgtagattatcttttgcagttgttactgcttgtgtcaattgttctacttgtgatttgtcgagtgttggattacctgtttggttaattaaatcttttgcattttgaactgctgcttggtaagcatctttttgcggtttatcttcattgataaacttgctaccagattctgtttgttgttgatcttgaatactattacgtaatgcttgcattgcttgatcaagcgcttttgcttcagctaatttttgtgctacttcgccacgagttgctgcgttgtttatttggctttcaagtgcttgacgttgcggattattcaaaccatttaattgatttaaatcagtaaccgcatgttgtttatcgtctgcaagtttttgatcaccgtgtaggttatctttagcttggttaacagcttgtgtcaattgttcaacttgtgctttatcaagcgttggattgttagtttgattaattaaatcttttgcattttgaactgctgcttggtaagcatctttttgtggtttatcttcattgataaacttgctacccgcttccgtttgctgttgatcttgaatgctattacgtaaagcttccattgcttggttaagtgcttgtgcttcagttaatttttgtgctacttcgccacgagttgctgcattattaatttgattttcaagtgcttgacgttgtggtgtattcaagttagacaagttatttaacgtttctgttgcacgttgcttatcttgagctagtttttgatcaccatgtaaattgtttttagcatctgtcactgcctgtgtcgcttgatcaatgattgatttagctaatgtaggatcagttgttttgttaatcaaatctttcgcgtgttgtactgcttgcgtataagcatctttttgcgcttgatcctcgttaataaatttactacttgcttcagtttgtggttgatccttaatactttcttttaatgctttcatcgcttcatttaatgcttgcgcttgtgcaatgatttcagccactttatcacgagttgttgcattattaatttgattttctagcgcttgttgttgagctggtgttaattgatctaaatgatttagagaatttccagcagtttgcttatcttgagctaatcgttcaacaccatctaatgcatttttagatgatattactgcttgagtcgcacttgatacattacctttattgatagttggattatttaatcctgcaatgatagactcagcattttgaactgcttcatcataggattgttttttattcggttctgcattgacatatgcactgctcgcacgtgttgcatctttgtcagcaatactttgttgtaatgcatccataagttgatctaatgcttgtgcttcagtcaaatcttgcttaactgctgttctagttgtttcactatcaattaacgtatcttccatatgtttttgtgcattgtttagatgtgctaattgactaaccgtttgcttagcatgatctttatcattttgtaacttcacatcaccatgtaatgctgctttcgttgtattcacagttgtcgctgcttgattaatcgcattattatctaatgttgcagtttgttcattgataatattatttgcggcttgaacagcttgatcatagttttgttgctctggttgatcttcgttgatatatttgctatttgctttagttgctgcgttatcttgaatgctctgtcttaaaccatgcattgcttggttaagcgtattcgcattttgttcaatttgatgaactgcagttactaaagttgcagctgtaacttggtcttttaatgctgttttttgaggatcatttaagcttgttaaagcatcaattgcttgcgtcgcatttgttttagcaacttgtaaattatggtctccatttaacgcttgaagtgttgtttgaactttagtaatagcttgttctacttctgtttggttcgcattttgaccagtttgtttgttaatcattgctgctgcttcatttaccgctgtattataagcagtttgtttatcagtatcagcattgatgaagttaccacgttgttcaacggcttgatgatctgcaatcgcattaattaagttacccatcgcagtatttaaagattctgctgtttgtttgtgaccattaactgcagcaatatcagatgattgcgtaatttgtgattgtaactgttgcttttgcgcattattcaaatgatctaattgatcaagtctgttgtttgcttgttgtttagctgctgcaaggttttcatcaccatctaatgcaactttcgtattattcacttgtgtcgttgcaccattaacatcatctggattcatcgtaggcgatgtagtttgattaattatattattagcagctgttacagcttggttatagtcattttgtctttgcgcagttgcatcatgataatcttcagacgctaatgtcgtttgattatccgcaacactatttcttaataattccatcgcatgatctaacgtttgtgctttttgattaatcgtagtgacatctgtaacaagtggcgcttgtgtaatttgactttcaaatgattgtttttgtgcatcatttaagtgtgttaagttcgccaattgttgttttgcttgttgttttgcatttgccaaattgtcattaccatttaatgcttgtttcgctgcgttcacttcattagtgatgctttcaacttgtgcttgtacttcattagtaccactttgtttattcaataatgcttcagcttttgctactgcctgtttatacgcattttgtttgtcaggatctgcatttaagtaattaccgtccgctaatgtttgagctttatcattaatagcttgtgataattgatccattgcttgatctaggctcgttgctgtttgtttaacttggttcactgtagcaatttcaggcgattgatcgatttgaccttttaatgcttgtttttgagcatcgtttaaatgcgtcatcccacttacggcatctttagcattttgcttttcagttgccaatttagcttcaccgtttaagccatttttagcatcagtcacttgagttaatgcacgtgttatttcatctgggttaagcgttggatttgtcgtttgattgataataccttccgcttgagacactgcatttgtatatgctgtttgcttatcggcatcagcatcatgatagttctcacttgctttgacagtatctttgtttgcaataccttgtttcaagttactcattgctgtattcacattttgtgcattttgtttagtttgttcaactgtagctaacgcttgtgcttgattgatttggttacgtaatgcatcacgttgtggttgatttaaatcgcgtaacgtatcaagatttgctaaagcttcttgtttcgcttgtgctaatttttcatcaccgtttaatgcatctttcgcttgattcatagttgtcactgcttgtgttactgtatcaggcgtcaatacaggtgttggtatgccatttgcgatttgttgcgcttggttagccgcattgttatatgcttgttgtttgtcttgatccgcttgtgtaaagtcaactgactgtggtacttgactgttcgcttgaatttgttgtttcaatgtacccattgcattatttaacgcatcagcattttgcttaatagcattaacacctgtaacaagttctgcatgcgacacttggtcttttaatgctgttttttgtggttgatttaagtttggtaactgatcaatggctgtatttgcattgtctttagcaacttgtaagttatggttaccgtttaaatcacccttagcttgattcacttgttgtaacgcttgagccacttgttgtggatccacgtttgcatttggtgtaccactaattatttgttcagcatgtgctaccgcattgttgtaagcattttgcttatcagtatcagcattgacaaagttaccatttgctttagtttggtctttatctgcaataccttgtttcaattgtgtcattgcttgatttaaatcatttgcatttgtaatcacttgtttcgctgcatcttttgcacgttgtacattgtcattaccattcaatgcttgtttcgcttcgttcacacgttgcatcgcttgttccacttcagtttgacttgcattgctgccatttgctttagataaaataccttctgcatgtgaaaccgcattagtataagcatctttcttagcttgatctgcatcagtaaagttaatgctatttaatgtctcagttttatcttgtaatgcattgtttaagttagtcatagcattattcagattttgagcattttgcttaacattattaactgttgcaatatctggtgcttgttcaacttgagttgttagcgcttgtttttgagcatcatttaaatgatctagtgtaccaagtgttgtcttagcatcttgtttggcatcagctaatttttgattaccgttaagtgcttgatttgtgtcattcactttagttaatgcttgttgaattgtatttggatccattgttggatttgttgtttgttttaacaattcttctgcttttgttactgcattatcatatgctgtttgcttgtcagtatcagcatcgtgatagttctcgctacctttaatttgtgctttattcgcaataccttgtttcaattgtgtcatcgcgtcattaagcgttgtcgccgcttgttgaatagcattgacgtttggtacaagtgttgcttgcgtgatttgtttgctgtattcatcacgttgcgcttggtttaagtttggcaattgatcaatagcatgttgaacattttgtttcgccgttgctaagtttgtattaccatttaaatcatttttagcttgcgtaactttatttaacgctgcagtaatttcgctaggtgtaacgacaacatcaggcgtagcactaattaatgcttcagctttcgctactgcttgattatatgcattttgcttatcaggatctgcattgacaaagttaccatcagcttttgtttgttctttatctgcaatgccttgttttaattgtgtcatagcattgtttaactcttgtgctgtttgtttaacattgtttacaccagctacagtagttgcattttgaacttgttgttttaatgcgtctttttgtgcttggttaaggtcattagagctattaattaatgctgttgcttcgtcttttgcatgttgaacgttggcattaccatttaatgcttgttttgcagcattaacttgtttgattgcttgttcaacttcagcttgtgttgcattgccgccattagcttttgaaatgatattttcagcatttgtaacagcagtgttatatgcttgttgttttgcttgatctgcatcagtgaagttaactgtcgctttcgtagcatctttgtcagctatcgcttgtttcaagttacccatcgctgtatttaagttttgcgcattttgcttaatttgatttgcttcatcaacagtatgcgcgccattaatttgatcagtaactgtttgtttttgcgcattatttaagttatctaatgaacctaatgattgtgacgcttgttgtttcgctgcctctaggttttcattaccatttaatgcatttttagttgtgcttacttgtccagcagcttgattgataacagtcggatctaaagttggacttgtagtttgatcaataataccttgtgcagttgtgacagcattattgtacgcatcctttttattctgacttgcatcagtataattttggttttgttttgttgtcgcattatctgcaatactttgacgtaatttgtccattgctgcatcaacattgtttgctttttgctcattaccttgtgcttctgcaacagtagtcgattgttgtaccaattgttttaatgcctctttttgtgcatttgttaaatggcttaaaccgtcaattgctgtatttgcgtgttgtttagctttttcaaggttttgagtaccattaagcgctgcttttgtagctgcttcatcattaataccattttgtaagttgctcattgctgtatttaattcagatgccgttgtagacacttgatttacacctgcaactgttgtcgcaccttcaatttgtgatttcaatgcttctttttgtgcattattaattgatgttaggttattcaatgcatttttcgcagttgtcttagcgttcgcaacattttgattaccgttcaattcgtttttagcacgttgtacattttctaacgcagtttcgacaccgtcttttgaagtatttggaccttgtgctttatttaaaatttgttcagcttgcgtcactgcatttgtatatgcattacgtttcgcttcgtcggcatcagtgaagttaacaccttgcttaatcgtattctgatcttgaataccatttttcaagttcgtcatagctgtatttaatgcatccgcattattttgtgcttgtgttacttcattaacatgcgttgcaccttcgatttgacgtttcactgcatctttttgagcgtcagttaagtcacttaagccgttcaaatgttgcttcgcatttgtttgcgcagttcttaagttttcttgaccgtttaacgcttgttgtttagctgtcacttggtctttcgcttgattaatttcttgcgcattcattgatggactagttgtttgaccaatgattgcttttgctgcagtgactgcactgttgtagtcagtttgtttgttttgacttgcatctgtgtagttttgacctgctttaatcgttgcttcattcgcaatgctatctcgtagacctttcattgcagtgtttaatgtttgtgcattatcacgaacagtttgaacatttggcaacgtcgtcgcttgacccacttgttctttaagttttgctttttgcggaccatttaaagaagttaaaccatcaattgcagtgttagcattttgtttcgctacttctaaattatgattaccgtttaactgcgtcttagcattcgttacttgcgttgctgcatttgtaacatctgctggtgttaacgttggtgttggtgtaccactaacgatattttcggcagctgtaactttttcatcatatgcttgacgtttattcgcatcagcattgacatagttaccactagcttttgtctcagctttatcagcaatggcacgctttaaagctgtcatcgcagtatttaattcagtcgcagtatgttcaacaccatttgctgcagatacacgtcctgcacttgttacttgtgcttttaatgcttctttttgttttgtatttaagtccgaagcatttgtaatcgctgtgttagcagcctgtttcgcacgatctaagttttgaataccgtttaatgcagtatttgcttgtgtaacagcttgcattgctctttcaacatctgctttaggtgtattaccgccagctgttttatttaaaatagttgctgctgcatttactgcttgagaataagcagttcgtttagcatcatcagcatcttgataattttgactttgtaacgtcgtgtctttatcacgaattgatgtttctaattgacccatagcaccatctaattgttgcgctttggctttaactgtattaacaccttcaacatttgttgcttgtgtaatttcattgtctaacgctgtacgttgtgcattattaatgtgtgttaatgtacctaacgtttgtttcgcagctgctttagcttcatttaatttcgcatcaccgttcaacgccgtcttcgtactgttcacattttgcaatgcttgttcaactgctgctttgtctacattttgaccactagcttttgttaaaattgctttcgctgcatttactgcttgatcataagctgatttcttacttggctctgcatctaggtatttctgagtttgttttgtttgtgtctcatcattgataccattttgtaaactatgcattgcgttatttaattctgttgcttttgcagtttcttgatttacaccagctactgttgttgcaccatcaatgctacgcgttaacgcatctttttgtgcattgttaattgatgttaagttattcaagttgtttttcgcagttgtcttagcttgagctaagtttcgcgcaccatttaatgcctgttctttagttgtcacttgtgatgttacttgcgtaatagtatttggttccatcgttgggttcgatgtttgattaatgattgcttttgctgcagtaactgcactgtcgtactcgttacgattatttggacttgcgtcagtgtagttttgacctgctttaattgttgcttcattcgcaatactatctcttaagcctttcatcgctgtattcaacgtttgagaactatttttaacagtttgaacaccatctaatgtagttgcactttgaacttgttcttttaattttgctttttgtgcattattcaattgtgctaagccgtcaattgtattgttggcatgctctttcgctacacgtaagttgttatcaccatttaatgctgttttagccgcattgacttgtgatgccgcactatttacgtcattgactgttaatgtcgcattcggtgtaccactaatgatattttcagcgttagtcacttttgaatcatacgcttgacgtttttcttgatcagcattgacataattaccgcttgcttttgttctttctttatcagcaatagctgctttaagtgctgtcatcgcactgttcaattcagttgcagtgtgttgaacgttatttgcatcagatacacgttgtgcattgttaacttgtgtttttaatgcatctttttgtttttggtttaagtcatgtgcgttgttaattgtgttcgtcgcatttgttttagcttgagctaagttttgtgcaccatttaacgctgcttttgttgtattgacttgatttgccatgccattaatcgcattagcatccatatttggattgttcgttgcattaataacaccatttgcattatttacagcagtattgtaattatttttgttgctgtcagatgcatcaagataattttgacttgttttcgtcgtattatcattttggatacttgtacgtaatgcacccatggcagtatttaacgtattacctttatctttaacaccatttacacctgctacattttgcgcttgttcaacttgatgcttcaagttgtctttttgtaattgtgttaagttaggtaaaccatcaatcgtatttgttgctgaagttttcgcatttcttaagttgtcagcaccatttaaagccgctttcgctcttgtaactgcatttaatgcattatcaacgtctgctttagatgtgttaccaccagtttgtttatttaaaatgccttcagccgctgtgacagcttgcgtatatgcatttcgttttgattcatccgcatcaagataattttgatttcttaatgtcgcatctttatcattgattgaaccttgtaagctattcattgcgccgtctaatgtattggcatttgtttttacagtattaacgccatcaacagtcgtcgcttgattgatttggccttctaagtcagtacgttgtgcattcgtaatatggtttaaagtgcctaagttttgtttagctgccgctttcgcttctgccagttttgcatcaccattcaatgcatctttcgtacttgttacttgttgtaatgcacggtcaactgctgctttatctgaatttgaacctgtttgtttatttaaaattgctttcgcagcagctacagcttgatcataagcagttttcttactttgttcagcgtcacgatatttttgagtttgttttgttgcattttcatcatcaataccatgttgtaattgacccatagctgtattaagttcatttgcagtttgttggatacttgttacatttgcaacacgttgcgcacttgtaacttgtgcttttaacgcatctttttgcgctttatttaagttagtagcaccatcgatggcatttgttgctgtttgtttcgcttgcgttaaattatgtgtaccatctaatgcatttttcgttgatgtcacttgtgtagcgatttggttaattgcattagcatccatatttggattgcttgttgcattaatgacaccattagcactatcaacagcattgttatagtttgttttgttacgttctgtagcatcaagatagttttggccatttttcgtagctgtgttatcttgtatgctatttcttaacgtacccatagcaccatttaatgtgttggcacttgatttaacagtatctacacctgcaacattttgtgcttgttgcacttgttgtttcaatttatctttttgagcagttgttaaatgttgaagtccgtttatagtagtgtttgcatttgatttagcttgctctaaattatggttaccatttagggcacctttcgcattagcaacttgtgacaacgcgttttcaacggcagttttgtctaaatttgatccactatttttatttaaaatattttctgcgttcgtaacggcttgagtataagcagttttcttatctgaatcagcatcatgatagttttcacttgctagtgtatttgttttatcattaataccattttgcaagttagccatcgctgtattcaattgtgtactcgtattagatacagcttcaacaccagctacagttgttgcttgatcaattttagttgttaagtcacgtttttgtgcattattaattgacgttaagttatttaatgcatttttagctgcattcttcgcatttgtaacgttttgatcaccattcaatgcatttttagcacttgaaacattttgaatagccgcttcaacatcttgtttagacgtatttgcaccttgcgttttattcagaattgcttcagctctgcttaccgcatttgtatacgcatcacgtttagctttatctgcatcagtaaatttaacactttgtttaactgtgttttgatcatggatagcttgttccaagttacccatttgcgtattcaactcagttgctgcatttttagtagcagttacctcactcacatgacctgcacgatcaatttgtgatgagatggcagatttttggttatttgttaagtgtgataatgtatttaagttttgcttagcagtgttttgtgcatttcttaagttttcagcaccgtttaaaccatttttagcattattcacttgtgttgtagcttgggtaatcgcactagtatccatagtcggattgttagtttgattaatgatacctttcgcatttgacacagcgctattatatgttgattggttattcggacttgcgtctgtatagttttgacttgttttgactgttgtttcgttagcaatactatctcttaagcctttcattgcattgttcaatgcttgtccatttgtttgaacagtttgtacgtcttctaatctattggcttgtcccacttgttcttttaatttagctttttgaggtgtatttaattgtgttaatgcatcaatagcagtattggcgttttgttttgcttcacgtaatctttcgtcaccatttaattcttgtttcgcgctgtttacttgattagctgcagctgttacttctgaaggtgtcgtaacaaccgttggcgtaccgctaataatatgttcagcattggtaactttagttgtgtaagcattttgtttagtgctatcggcattaacatatttactgcttgctaacgtattcgtcttatctgcgatggcatgttttaatgtgcccattgccgtgttcagttcagtcgcattgtgctgtacatcttgtgcattagatacgcgttgagcaccattagcttgtgcttttaatgcatctttttgtttttgatttaaatcagatgcgccattgattgctgtaatcgctgcttgtttcgcattgtttaagttttgcgtaccatttaatgcatgtttcgcattattaacattattaagtgcttgttcgactgctgttttcgctgtattcggtccagtttgtttatttaaaatggtttcggctgctgatacagcttgattgtatgcattacgtttttgctcatcagcatccaagaagttttggctcgctaatgttcctgacttatcgttgatagccgtttgtaagttacccatagcaccatctaaactattcgcattttgtttaacagattcaacaccagctaagtttgtagcttgtgaaatttgatttgttaaatcattacgttgagctgtagtgatatgcgttaaagtacctaaatgttgtttcgctgcgttttgagctgcaattaattttgcatcaccattcaatgcatctttcgcattattaacacgttgtaatgctgcttcaactgcattttgcgcagtgtttggacctgtcgatttatttaaaatcgctttcgctgcagtaatagcattatcatactcttgttgtttatttgtatcagcatcacgatatttctcagatgatttcacttgagattcgttgttaataccattctgtaagctagccatagcttggtctagatgttgcgcattttgttttacagtatcaacaccactcactcttgtcgcactagtaatttgactaatcaaattgttcttttgagcatctgtaatacttgtcaatgtgtttaagtacgttttcgcattttgttttgcagcagctaagttttcatcaccgttaagtgccgttttagaactattcacttgctctgctttttgtgtaatcgtacttggattcatttctggattactattagcattaataatcgtttcagcagcagctactgcgttgttatatgctgtttgcttatcattattagcatctacgtaatcttcacttgctttagtcgcatctttgttggcaatactttgtcttaacgtattcatggcttgatctaatgtattggcatttgattgaaccgtttgaacaccagcgacagtagtaccactattaatttggtttgttaaattcgttttttgtgcagttgttaaatgcgtcatattatttaactgctgttttgctgtttgcttcgcttgatctaataaacgcgtaccatctaagttatttttagcagaattcacttgattcatcgcttcagtaacttgatctttcgttttattttgaccatttgatttatttaaaatatctttcgcagcttgtaccgcatttgtgtatgctgttttcttactaggtgtcgcatcttgatagttttgactattaagcgtcgtttgttcatcattgattgcaccttgcaagttacccatcgctgtatttaaatctgtaccttgttgtttaacagtatttacgccagcaatatttgatgcagcattaattttagatttaacatctgctttttgtgcattatttaaatgtggtaatgcatcaattgctcttgcagcatctgttttagattgtgctaatttttcataaccatttaatgcatttttattagaagtaacagctgaagttgcacgattaacatcatcaacagacatcgttggatttgttgtttgattaatgattgtttcggcacttgaaactgcactgttatatgcattttgtttagctgtatctgcatccgcataatcttctgtacgtttcacttgatctttatctgcaacagcttgtcttaagttacccattgcactattcaagtttgttgcattttgcttaattgtattaactgcatcaatttgatgcgcaccattaatttgcgattgtaagttttgacgttgtgcattatttaaattgtttaaatgacctaatgcagtattcgcttcttgtttcgcagcatttaacttagcttcaccattcaatgcatgttctttacttgtgacatttgataaagcattgttaacatcacttggtgttataactggatgttgtgcattaccattaataatgtcattcgcatggttgtatgcattgttgtaatcatttttcttattagtatctgcgttgacataattatcactttgtacgacttggttatgattagcaacgccacgttttaaacctgtcatagcagtatttaagctttgagtcgtttgtttaatatcatttactgcttgcacgttttgtgcactattcacttgttgtgttaatgcattcttttgtgcttggtttaaatcacttgcatgcgtaatcgcatttgttgcttctgttttcgcacgttgtaagttttgttgaccatctaaagcatctttcgtcgatttaacagatgctgctttttggttcactgtgttaacatccatcgttggattagtcgtttctccaatgacacctttagccgcattaactgcattatcatacgcttgtttattagctggtgttgcgtcagtgtaattttgatctgatttaattgtattattatccgcaacactgtcttttaatttcgtcatcgcagtatttaaagccgtaatgttagacttaattgtttcaagcgcagcatgattttgagcagcattaatttgttgcgtgaaattattttgttgtgcttggtttaagttagatgcaccatgtaatgttgttaacgctggctgtctatctaatgttaaaccttgacgtgctgtatttaattgatccttagcttggtttgcctctgtcactttatcattgatattttggacagttgggttgccattcaacacttgattaatttcagttaacttttgacgcgctgcttgtaatttttggttgtacgcatttaacgaagcggtcgtcatacctgttgtatccgttggttgattaatgctttgttctaattgcgttttcgcagtttgaagcggcgctttatctggtgttaaagcttgacgtgcatgatctaaatcagatttagcttgatttgctgtagacgtatttgtattaatttgttctacagtcggtgaacctgctaatacttgattgatttgttgaatcttattacgtgcagctgttaacttcgcattgtatgcatttatagagtcttgtgtcataccagttgtacttgtttgcgtgtcaatactatgttgtagttgatttttcgcattttctaaaggcgctttatcgactgttaagccattacgtgcttgatcaagtgctgatttagcggcattcgctgctgtcacgttttgacgtattgtcgcaacatctggatgtgaggctaatacacgatcaatttcttgaattttagttctagctgctgaaagtttttcattaaatgctgcaatagatgcgcttgtcataccagtcgtactcgttggctgatcaatatcattttgcaactgagtttttgcagtttgtaatggtgccaagtctggagttaatccagcaattgcttgttttaagctattatatttttcttctacttttgttttttctgcggcaatttgttggtcagtcgcatcaccattgttaataacattttgtgcatttgttgattctgtttgacccgcacgtttagcattttcatatgcttggattgatgattgtgtcataccatcagtagttactgatttattgatttcttcatcaagtttcgtcttagcagtttttaaagcactattatcagctaaaggtactaattgattaattgcttgcgttaatcgctcattgacacgatttacatttgttaacgcagattgcacttcttgtactgttcttattggcttttgaataatagcattagcgctatttttagcacttgttaagtcactttgaagtgcacgaatcgaattattgtaagcagtaatacttgccggcttcttaccagtcgttgtacctgtgcgattcaattgttgcactgcttgctctaaggcatgtgtatctgcagttaaatcatgtttcgcttggtttaatgctgttaatgcgttatcgacacgatgtttttcatctgaaatttgttgtgcagttgcatcgccattgtcaataacacgttgagctgcagttatttcagtttctgcttcacgcttcttcgcattatagttatcaatactttgttgcgtcataccagcagttgatggtacttggttcacagaactttgtaagttatttttagacgttactaattggctattatcttctttattttgaagtaatgctttagcttgatcaatcttagtttgtgctgcacgaactttagttagtgcgtcagaaacttgttgtggtgttgcacgctcattattaatcacttgttgtgcttctgttttcgcagtattgatttgttgttgcgcattatgcattgcattattgtactgcgtaattgtacctggctttttaccttcagtgcttactggatcatctaaatgatttttagctgtgattaactcacgtttatccgcttttgtgaaaatggactcttgtacttcttcagtactaccatcattgtaagttactgtcacaggaatcgtcgttgtgctaccaccagctaaattagtaggcattgctgtgccatttttaatcgttgcagtacgtttattagcaacttgaactgcattgttaatttcagctgctgttacatttgaaccataatctttcacaatttcagttgtgttgacagtatgagctgccggtgcagttaatgtacttggattactacttactgagtgacctgtacctgctttcggagtaattgtgattgatgaatttggttttatagtattggcattgaacgtcactttaccagtttgtgcatctaacgttacatagtcaggcttattcgcaattgtccattgattattttgaccacgaacaacattaattgtcttactatgttctgcaccattacccactttttcagtgtaagcaatatccattgcttgagttggattaattaaatgtcctgatggattattaggcgtgatatcaatatgaccattttgccaaatcttagtagtcgcttggttcggttgtggtgcgacaactgtgaaatcatcactacgttgctcatcactcactgtctctccgcttccttgcgttgcaacaacttgaattgtatcagcagggttgaaagtacctgctgcaacagtaataccattattagttccagcaatacctgctacagttgctgcagatgcttctttcacccatggactcgtattattgcgacgtgtaaatgtcgtcacaacgttaccattacgtttaataactaatttatcagcgtatgtcgttacgttaccggcatgtgtattcactgtttggtttgctccaggtgcaattgtaatcgctcctgccgctgtttcagtcacagttggtttcgctggttgcacatcttttactacaaatttcgctggtaaagatgttgcaaaagtatgtccgttatagatgacgtcatattttgcgttaacgactttagccacattcggtttattcatagctgaccagtttgcgtcatttgtacctgtagtatcacgattccatttatacgtaaatccatctgttggtaaaccagtagcattttgcatatgtgcatatcctgatgcttgcgtaccacttgctaaagtgcctccaaccgttgtcgtataagtagtttgagggaattcaaattgatatacattaacagtaacaggaactcgtttagcagctgaaatacctggatatgtgacatcgacatttaaatgttgcacgcctgcttgttggttatttggttgttgtctatttgcccatgctgcagtgataccatttgtgtttgtatttggatcaaatgtaatgtagttcatcgcatccgttccattagtcaaattttgacctttcacatcacgtgatggcgcctttgcattagcaactggataaactttgactggaacttcaacattacgcgtaccttgaccattaggtaatgttacaaccgcagttttatgagtgttaccgactgtattcttccatgtatctggactatcatgccatgcaaccgttgccccatgtggcgggttttgaataaatctttctacgtgtccgaaatcaaaaccgtcgccacctttaataaatacagcgccttcagtagttgcttgtaattgtggtgtcactgttactgttgcactgtcatttgaatcaacagattcatttcttgttactgtaacaacttgaccatgttcgtcttgcgtcgtatacgtcacattgttcattgaaattgaagattttgctttaattccgccatttggtaacgcgtcacttactgtcacaaccgaactaaaaccgctaccatgagtaatatttgtgacatttaatggtgtattatctgctttaaataattttactgacgagttatttaatacgttattaactttaatttcttggtttgtaagacctgctttatatgtcacagagtttgcgtcaattctaggtgggtcaggtttaactttagataaaatagttaaatcttctgtttgtctattatcatatgtcactctaataagacgagtagatatgcctacaacatctttgttaggaccatatgttccaacaaattggaaattcatatgttgcgcatttgtcgaccaagaattatttactggcttaacatattgtttcgcatcatacatatctgaaacacctgggtataaaacacctctggctgtttcaaagacatgtttcggtacagttcttactactttatatgttgctgttttcgtaatcggcgttgtttcgccatcaattaagatatgtgcagttacagttatatcttcaccaatacgtgtattatctttatttggcgcttgtccacttacccatgtaatagttgcatctgcaatgtcactaccattagataacttaaagtaatctgatgcactagaaccattacctgctgggaagtcttggccttgtacagtgtaatgcgaatgtgcaacgatttctggaatgacatgctttacaggtacagtcactgttgatgttgttccatcttgataagtaacagttactgtgacattggcattatttccagtacgactgacattactaactgttttactagtgatttcattcgcacttgctcttgcataacttctatttggtactgtttcagtaaacgttaacgaattaataattgtcgtttgatcagcttgtgatactgtcgcattattcgaaatattggcaattctcacaggattagcagccgttgatgaagtaccaactcgatatttatcacgcaaaggtttcactgttacattgaacgaagttgtagctgtattgccgcttgtatcagttgctaataaattgattgtcttattagttgctgatgtcacatttggtgccgttgcagaaacatgttgatggttattatcaacagtacctgtaatttgtgatgtatttggtacagttacagattgcacaccaaagttatcattcgctgtaatagtatttgtaaatgtttcacctgagaacacttgatgattagtgtaattacctactgaaattgttggattcactaagtcacttggtacaaaataaatgttaatagcgtcagtagtatttcctgtattttgatttaaatgttcaacatattgttttggaccatatggcgttaagtataactgtgctttataaactgcatcacttgcattatgtgtagaattactttttacaacgtggtcaattgtaaatgcgccagcaccattagctgccggttcgtttacgttaacaacagttgagttactatggtttgcacgagtatttgaatttgtaacaggttgcccaccataaccgtttgaagggttgatgatgtctaacacttgaatcacttgaccattcaacgtaaattgacgttgaccatcagttgtcgcatttgattgtgaataaccagtcgttctaaagttaggtcttccgccagcttctgcttgtgatttttcattaccagtaatgttatttcgcaatccaggcactgtagttgttgcttttaacattgttaaaatatcattcgtcgtaatttgagtacctaatgtagcatcataacgataaattaaagatttatggtcatcagaccatgataaaccaccatctgttggtctgtttgcaatttttgcattcgtccatgtcactgtataatcttgtgggaaattaacccaacgcaagaaattcatattagctaggtttgacgcgaatgatttcgttaatcgacctttattaatatttactgtaatagtacttacattagcaccattaggtgtatttgtaactgaaatatcaccttcggcaagcgtaattacatctctatttgcattaataaatgcttgttttacttttgagatttcatcagtagttaaatcatatgttgatgtacgatatacacgttgatcgccttctggttgtttcacatcgatgattttcaaactaatatagaagtcttcactatctttatgatacgcatttgtagcagttatatggtataactgcgtgcctgcgttcatttgactaacttcttgtgcagttggaatagttctatcagatgtaatatttgtaaatgtgccacttggaataggttgtccattacttaaagtaaaatattgtttaatatcaccaatactaaatgattgtcctttagcaatcgttaccgttgctgttttagcagcattgacagtttggtattcaggtttcacaactggttcgtatgtcatcacatttgtagcatcaagcgttgtcgatgagccatcacggtaatgtaatgtgacattaccattattatcgacagttactggatcagttgatgctaaatatcctcttatattttggtttttattcataaaggcagtaattatgctttgcttttcatcattagatacagcagtcggattgactactacaactttctcagtatttcctaatacaatcggatgagcatcttcactaattttacctacatgaattgaaacatgtttagattgactatcatttgtcgtattattgacattgtctgtcgctgacactttaaatgtaatatcactgttaaatgcctgattcatactcactctacctgtaatagataatgagccattattcttatccgcttttgttaaatttgatgtccaaccattcggcaatgtcgtaatagttgtattttttataccagaatgtctatcagagacacccattgtaaagttgacttcgtcgcctcgatagtatttggcatttattccaacaggattattgattgttggtggaatgtcatctggcaaaatagtaacagcattactcatattagatgcaactactttattataataaactactgctctaatttgtttacctacaggtggtatgaatacaacataatcttgcggtcgtatagtaattgtattatgcaccccatcaggtgtaccagtcgcaagtatcgtataaccagatggtatttgatctgcctcactaccaccattcgtagtttgatttgttggtgcaactaaataaaccaatgccgatggatccaacggtattcccgaaatattaacaggcactttttgtaatgctgtacctcttaattgctcagctgtcgttgtaattgttggtgtatgtggtttaacacgaatttcgaataattgttctttacgtccaaaacgtatcgttccaaagtaatcccctggtaataagttaccaacaagttcaatattgcgttctctggcattattaggtctatttgtcgagttttcaatgtgtaatgtacgcggaatacctgtaatttgccaatctttatctgtaaaattctcattacttgttaaattaatacgtaatggttgaatagatgttacgctaccacctaaattcacggaagcattcccttggttacctgcatatacatagaaaactggatgcccagcttgttttgaaaatggtttttcagcaatattttgagtatcgtcatttttaaagaatttaatattatgttggatttcaggtaataccgttaagttaacaggaactaaagtttcactattaccataagcatcaggatagtcgaaaccaatcattaatcttattgggtttctagttcttgctgcttcttgtaatttttgatcagtaaataattgacttaattgatattcatttaattgttgggctccacccggtctaaaagcattagtatttgcattattcgaataaaatcctaacactttattactcggcgtcttaacataacttaaaggatcatcaacaaaatcatctatatttaggtttgtactttctaatacctttttcgtttgtacatttccttgactcacttctacacgtttagttgtacctatgcgatatgtacgattaaccacttgtcttaaaccattaagacgttgttgatggtcttgcgttgattcgacgtatagttgactgtacataaataattgattgtactctaaagcacgcccacctgctgcatagtacaatttattaacagttggaccttgtgttttaaatgaaattgtataacttgcatcaccttgaccgatgaaagtataaactttaggaacacccggtgattcagcaggtttttgaccattaatatattcaaaattttgtctaccaaaagctttagtagcaggtgtcgctccagcttcactaaaataatcactcgctctagataaatcttctaaagaataaatatggacagttggccagtcatatattacttggccacttctatttcttattttaaagtcatgtgaacgatgaggatcatttactccatattcccacatttgttgaagtggtttatttgcacctgctcctgctccatgactccattgtacatttgttccatctgaattaactgttacaaagtcagttcttcctactggcacttggtctgctggtaatgcaaaccaaaagatcatattttgatgtggagcatgtcctttattaaacttaataacccattggtacccgtctccagtttgtttcgctgtcataagagcaatttcctttgagtcagaggccttcaatgtattccatggtgtagttggtaaattatatggcgcccctttactagaagcattgatatatgtaccaacaggatagcccgaaccatcattagcattttcaacataatatgatgaatttgcattttgatagtctgatactgatctaggctctgcagctcttgactcaaccgaacgcgtttgaattctatttgaacgtcggctagtctgttgacgttgaggcattgtacgaattaaagcaacagcttgttccaattctttgtatgcaagttgcaagtctttattgtttattggatcattactgcctaataacgtattaatcttatcaaaaatgccttttacatagttaaatgtgccagaatctgcattttcacggtcaataaagcgataatcatgataatttgcatcaaaaaacgcttgtaattcatttcggtcatgttgtacgttaccattatcagatgaatctgaagctgttactacatttgcttcatgattttctacatgagccgctctattgtcgtttccatttttattagcagattgactttcgttttgtttatgcttactttgttctttatctggttgtgttgtcgcagccgttgccgaatctttctttgtatttacattttgagatgctggttgttcatcattagtagtagatgattgcgctactttttgatctactaaattagcttgactaatatttggttgctcattttcatgagtagcagataatgattgaccattttgtgaattttgagaattttgtacttgagattctcgattctcagtctgttcattattactttgttgtttctgtttaaccacgcttgctggttgatttgtttcagcagcatgtgcttgtgatgtattgaatcctaaaaataccaatgtcgcaatgacagttgaaaatgtaccaactgtatatttacgaatactaaacttttgaattttatcacgataattcacagctattgttcactccttatcttgttgttatgtctctgttgtgttgtgaatgtatttacttttgattgcttgtgtattgtaatgctcattccattctcatttaaaaatttaaaacgatgacgattcaatacaatttcgcaatctatccaaaaagtattgaaacacattacaactatgtgttgaacaatttatttatgctccagaatataataacacaaaatatattgtaaggtaaattgaatttgtgacaatttataataattataaataaagtagcgtaaaagagtaataaaaaaccaatccctatgttcatttaaaataatgacacataagaatcggtttatatttttgtttaatattgtagcgacttgtatgatttcaatttaattctcaattatcataattgagtgtcgttttgtttaggcacaagtaacaaaatgataacgaatgataatattcccatacctgcatttaaccataatgcaatcattgcacctgtataaatgtttgtcatatttgatacgattgcatatactgcaccactcaatgcgacgccaaatgctccacctaatgcagaagccattttatagatacctgcagcaacgcctactttttctaacggtgcatttgcaattgctgtatctgttgatggtgtagcatatatccctagtcctaaaccaaagaataaataacctataatacaacaaatgacatagaatatttctggcaagaaagttaatgaaatgagacattctccgacaataagaactcctgttccaattaacattggtttcttgcatccgagtgtttgaagtaacttttcaccaacacgaatcataattagtaccattactaaataagtgattgataaacttcctgcttgcaatgaagaatatcctaaacctctttgaacaaatgtgttggctactattaatgttcctgcaacaccatttaacaaaaagtttgaagctgttgcacctgtgtaagctttatttttaaataatttaaaatcgattaaaggatttgtagcacgcttttcaagaactataaataaactaaaagatccaattgcaatagctaataaagtaataaaaagaagtgaggttacacctaattctgatcctttagtaattaaaatatttaaactgaggagcataatgactaaaagaaccagacctttaatgtcaaatttatttagagaaatcgatttagatttagtttcaggtgtgcctttaataagaaacagtgcaattaatgaaattataattgataggatgaaaatccaacgccaacctaaaagcgttgcaactgcacctccaaaaaatgaacaaacaccagagccgccccatgagccaattgaccaataacttaaagcgcgttgtctatctttcccaatgtaatatgacttaataatagacaaagttgcaggcataatacatgctgctgaaagtccttgaattaatcttcctataataagtaataaaggaatatttgaaataatgattaataatgaacctaatatatttaagataataccaatgttcgtgagtttaattctgccatatttatcagcaagaccacctgctcctactacaaacattcctgaaaataaagcagttatactaacggcgatattaaccgttccaatatctgtattgaaactatcttcaagtattggtacaacattaaccaatgattgtgcaaatagccaaaacgttattacacttagaacaattcctattaacaacttattattgccttcaaatgcctctcttgacggcttttccatctctatttgcctccctatacttttgaaaaacagacaaattccataacagaaatttgtctgttccatagaataattgaatggtttttgattttaatgtgtaaaactttaaatttattagtagtccatccatttattctcaatgctagttatcttaccttatgctgctttttgtttctttttatagtaataaactggtataccaagtgctgttattagaattccaatgattgctaatataaattgtgtaaacagtgtattaattaatacaaatgatcctgccaaaatagcaattaaaggtatgatcggatataacggtactttatatggtcgttccatatttggttcacgttttcttaaaattattaccgcaacaaatgacatacaatagaacaaccaaataacaaagattaacatatttgtaattgtatcaaatgctcccattgacatcatgatgatagcgattataagttgtataattgcgccaaaccatggtgcgccagattttgttaattttgcgaataaatggctaaatggcaataattttctttcagccattgcatatggtacgcgcataccagtcatagtatagccattgatcgtaccataaacagaaattaatataccgattgtaataatcttaccgccattttcaccaaataatatttttgatgtatctgaagctgcatttaaattaccagcaagtagttctattggcaacgttaataagaatgtagcgttaattaataaatacacagccataatacaaccgataccaactgaaatcgctaaaggtaaatcgcgtttaggatttttaagttcccccgcaacatttcctacatgaatccaaccatcatatgcaaacatagttgctaataaaccactaccaattgctgtaaagaagccatttcctgaattacctgtagttggaattaatgaaaaagtgatatctccagattgaaaaataccaaaaattacaataacgatgattggaatcagtttaattactaaagtaactgattgtaaaattccgcctgcttttgaacctaggaaatttatcaacacaatagataacgcagatgcgattgctattggtattaacgaacctatagataaatggaataaattaattagctgtgtcgcaaatacgatagacaatgctgctacgttagctggaaaataaataaatgattgcgcccaacctgataggaagccccagaaatcaccgtatgtatattctatatacttcgttaagccacctgtttcagggattgcagcagcaagttctgctgctgttaaccccgcacaaatggtaatgatgccgcctaggaaccatacaaacaaggccattcctgctgttcctgttacttctgttacgtttgatattttaaagaatactcctgaaccaataactgtccccataacaatagcaaacgctgagaagaaacctatatttttttgtaattctttaccatttgacataattacacctcatttttaagattaaatgttttaacctaccacacccttgcttgtatctgcaatattcagtccatgttcaatgacacctgaaactctagttaagtcaacattcccgcctgaaactaatgcaacaacatttttatcttcaagccatttattgtttatttttccacttaaaattgcagctgttggtaatgcgcctgcaccttcagtaataattttggcacgctgcattaaatctttcatagcatgttcaatttcttcttcagtaacaagaataaattcatctactaaatgtttaactacttcatatgtttgttcaccaggaacttttacatcacaaccatctgctattgtgctatccactcgatgttcagttaaatctctcttatagaaagactcagccataccatgaacattctcagattgaacaccgataatatgaattgaagggttaaatgattttaatgcggtggcaatacctgcaattaatcctccaccgccaactggtacgatgactgtattcacattccaaatatcatctaaaatttctaaaccaattgttccttggcctgccattacaaacttatcgtcatatggatgaacgattgtcatgccattttctttcgctaattcttccatataaagtctagtttcgttaaagtttttaccttttaaaataacctttgccccatagccttttgttgcttgttgtttcgcttgtggtgctgtttcaggcattacaatcgttgcatcaatgcctaataatttagctgttaaagcaacaccttgtgcatggttcccagcagatgctgcgataatgcctttttctttttgttcatctgttaagtgattaattttattgctagcgcctctaaatttaaaagatcctgtgaattgcatattttctaattttagaaatacattccctttagttatactttggcttaaatacattgatttaattagaggtgttcgacgaataaatggtttaatgcttgctttagcttcttcgatatctcctaaacttacaatatgtgctgtttgtaatgtaactgtgttggttgtcataataattacatccttccgttttgtaaatttttagtccaaactataatgctatatttaaaatattcatttcactcaatttcatttaaattactatctattcgataacatttaatatttctttataatctaggtcatgtgatgaagctaatccttgatttgtcacttgtccttggtaaatgtttacaccagtacttaaggcttcattatctttaattgcttgttctaagcctttgtcacaaatttctaatatataatcaatatttccttgtgctaatgccattgttgaagttcttgggactgctcctggttgatttggtacaccataatgaatcacaccttcttcttcatacactggatcagaaattgtagttggtctaattgtttcaatagttccaccttggtcaatagctatatcgattaatactgaaccttttttcattgatttaaccatctcacgagtaaccaattttggcggtttcgcacctgaaattaaaattgtagaaataaatacatctgctttcttaatttgttctgctaaattttctggtgttgatttgactactgtgacatctttttctgcatacatatcttcaagatatttaatgcggtcatcgtttaactcgataatgattactttagcatttagtcccaaggcaacatttgctgcatttgttgctgctactccaccaccgaaaatcacatatgtactaccaggtatatccacattttcatgtacaccagtcactaaagtaccttgaccaccatgttgtgcttcagagtagtaagctcccataattgctgagcgttgacctgctatagcactcattggcgctaataattctgcttttccattttttataatggtttcaccactaatcgcagttacaccaacttcttgcattttttctactatttcttttgaagatgctagatgtaaaaatccccagataatttgattctttttgaaatattgatattcgctttcatgaggttcttttactttgataacaagatcagcttcccatgcttgttcgtgagttacgatcttagcgccttctttttcatacatatcgttagaaaatcctgaaccaatgccagcatttttttcaacaattactttatgtcctgcatccgttaacttacgcacattttcgggtgtgcaagctacacgtccttcaccttgttttaattctttgactactgcaactaacatttgcaacactcctctttcatttgtgaataatttcacaattattttatcctttggttatgaatatgtaaataccattaattaattattcatattttatctataatttgttaataaatatttaatatattattcttattcttaaatattatgtgcaattataccactatatttatttcttatactccatttgatttatagttgtattaatacattgactcaaaaactaattaatcaaatatgttttttagattaataaagttgtaactgtactattttgtagtgtatggtaatttatttggatgaaatataattctttatactctattgattaatcaaatatgtatctatcaaaattcggcttatttattcactctgacatatccaaatacgcaaaaagactatttctaccttgtatcgatagaaatagtctt

SEQ ID NO: 9 - DNA, 2821361 bp, Staphylococcus aureus subsp. aureus NCTC 8325 (residues 1,410,682-2,821,361 of 2,821,361)
  misc_feature (2350012)..(2350012): n is a, c, g, or t
tttatacttaattggtttaatttttcataaaatcttatactttttaaaaatgggatgaaatatattttcctgaaacatgtaattcatgttcgttacaaattgataaaatatgattaagcgttgttgcaaatgacattttctcaaaaagcgcttcactatcaattggtacttgtgtgtgaatttcagccagtcgcttcgataaatatagttcatctaaattgtcattaatcttattacgttgcccagctgataatgcatcaatgttttcaaccacattttcaacgctttgatattgctgaattaacttaatagccgttttctcgccaatacctttaacacccgcatatccatctgctgtatcacccataaacgctttaatatcgattagttgttgtggttcaagggcatattcttcgttaaaacgatgtaatgtatatctattataaatgttaaaaccttttttaattagccaaacttcaacattgtcattaatacattgcagtaaatctttgtcgcccgtaataatatagacatcgttatcagttgaatattgttgtgctaatgtacctataacatcatccgcttcatagtttttaacgccaatatttacaaagccaaattgctctgaaatttctttaacataatcaaattgtggtatcaattcttctggtggtgcagaacgattttgcttataaccatcaaacatatcatttctaaaagttgattgtcccatatcccaacatacagctacatgtgtagggcgtatttcatgtattgccgaaaagatatgacgcacaaatccttgtattccatttgtaggttcaccttgtgaattgtacataaattgtttatgaagacttgtagcatagaaatgtctaaataatagcgccataccatctacaagtaatattttattaggcatttaaaacgttccttctttcttaatataaaatagttttcagttgttgatgtttatctttcaattgattgataagtgttgtatctaaatcaaatgctaataaatcgtttatttgcgtttgaatattagcttcaaaactttcaaattgcgattcagcttctacagccatttgctttacatataattcaagctgttgcctcaataatcccatttgtggttgtaataatcctaacgtactttgacaaattgattcatgtatatctctttgcccatttggattcaaaattttacgttttgttaattgtttaggcaatgcatttagcatatcgttgaaatcgatgtgcaataatggttgctctatattagctgattcaaagttaaactgaggattaataatgacatgtaaatctgctaattgttgaacgattggtgcaatttgctcagtgagttgcttattaaagtatttttttatacgttctgtaattaaagattgctctaaaaacaatcgttgatgaatttgatctaagtatactctcgtagacactttcttttcttcattaaaatcactattttgcgtcatttgagaattaaacactgatttaacatcgtcaagtagttgtagttttaaacgggcatttaaatgataaacttgttcttcaacttcgttgtctgtatgttgtaacgtcgcatcaattaattgatgttgtaaacgctgtttatctttataatctgttaacctttgttggcgacgtgaaatatcagctttatttgtttcaaattctgtaatcatctctacataagaacgatccatttgttgaagctgatgaatcatttgttgttctaaaattgatttagattcaacatcaacaaattgttgtatgctttgttttaattgatcaatgcccttatcttcagcttgcaatgcatttcgacttgatacagcaaaaatgtctgattgtaagtgtacttgtcttaatgcatctgatacatatgtttcaactgcttcaagatcatcttgactttctgctaaatcagcagcattaattaccattttaaatgcttggttttcattcaactggttcatatctttcatgtgttctataaacgctttgtcattatcagtaaatgaatgattaaaataacttacatacaatattaagtctgaagaagttaaaatttgttcggtttcatttgtatgcctttggttatttgagtgtagccctaatgaatcaacaattattttaccttttaaccaatcatgcattaatgcaatgtgtactgtcttaacaaatgttgcatattcatcttctgcactccactttttcaattcctgttgattaatggcatgtttttctccattttccaacatattgacatacaatttataatgtttttcaactgcctgaataaaagcgagttgatttttatttaaatgtgattttaacttttctaaatctgaattaataaagtcttctatagtcgaataagacatatcttggtattcaactactgcattaatttcatctaataattgcgattgtgattttagcgttatataactctcgtctccataagatatttctgtagtagctgctgtagtaggatttggagaactgactaaaatatgctcgcctaataatgcatttatcaaactacttttaccagcactaaatgttccaaatacacctatttttattaatttattatctatacgtgttaatgtttcgtggatatcttgctttgtacgcttgaacaaaggcacatccgaaattatatcaagcgctttttgaatatctatagacatatttgttgtagctgtattttgatttagctgctgattatcacgattatcctgagcattatcagtagccacttgatatgttgtctcttgtcgacctattaatttatctagagattcatctaaatgaatatagtagtgacgataattcttagtcgtcaatgactgacgcagctcatttaattctgtataacgttgatattcttttaaatcatcactttcttctgttggtaattcatctgcctgcacattttctattatttctttaaaaattggtgttgattgttgttcaacatatttcttaatggctttaaccacttcgtctgaaaatgtaagtacataagtattgctgattgatgtttgtggttgatataaaccttcaatcatttctggcttaacgtcataatgctgatttaatactttatctgaagcttcttttttattgataaaacgcgtaacaaatgacatatcttctcgcattggttgacgaatttgttgattaacatgttcttgtaacgcatctgtcgctgttaataatcgctgttgttgaatttgtagttttttcttctttttattaaaaaatccgccaacattaaagtcttgagacatactttccaaataacttcgtaacatttctctcatattatgcggcataatgtatgcattttctaaaatatttttacgcttattctttaaaaatgccattaattcatctggattatttaaaagttgtgcctcttcactaattgcttgatgttgttgactatttaaaaatgcttgttcaaactccgcttcttcgatacctaaatcttctagtacttcctgaatttcagactgaatgtaatctagctgagcttcggtaatgtattcaaccgttcttgatgtataatcctctattgtctctctatgttgatctaatgaaattagataacttgataatacttcaagttcattttcagggtgatcaaatttagatacataaaaggtgcgttctaatttaataccccaatctgcaattgatttttcaactcgagatttaaacgtagagaatgacaattcatcgtcttgatgcttgtcaatttgattaatgataaacacaacaggtattccaacatcatttatatgcttcataaacttaaagttaagttcagattgaacgtggttatagtcaaccgtataaaatatcatattacttgtatacatatattgttctgttattgactgatgtgatgcaacatttgaatcaacacctggtgtatcttgcaacgtaaacccattttcaaatttagctgattgaaaattaatttctacagattcaacgtcgacattttggcgattcatttcccttacttcatcataattagataatttggcatacgtttgattcggcaaattagcaataatatcgtgattgtctgaaactgacacaatagcagtattacttgtcgttggtacaggtgaacttggtaagatatcttgttcaattaataaatttatcagtgtcgatttacctgcagaaaaatgtccaacgaacgaacatgtatattgctgcaaatatactttcttaattacttggttaattgtatgtaaaagtgcttcatttcgcgacttttcaacttctttttttaatttatataaaagatctaattgttctttattaatcatgttactttcccctttggttcgttcacatagaaatgcttgcttgttacaacgaattcatacaatatcgatgtccatttaaacatagatcgttaaatggctcgcattgtattatgtttaaattttatcatagctgcttgataaaacatacgaataatcaattttcttcaaacattccaacttaaaagttcatttttctaaaaatcacaaatcatcgttaaatttttctagaaaataaatattgtcacagtttgttcacacacatcacagaattgacaccgtataatagccaattgggagggaaatatgaaaaatacatttaatccattacaaagattacatttctatgcagcaatatttattgctccactgttaatcactttaaccatttcgggcattggttacttgttctttccagaagttgaaaataatatttataagaatgagttttttggtgacagtgatgtaaaaacgcatcaaacattaaatgatgcagtacatcaagttgaacaacaatatgaaggattctttgtaagtaaagttagcatacttgatgaaccatataacaaacgaattacactgagtgatatggcaggaaatcaacgttacgtctttctagatcataacaatcaatttgttgcagatcaaaatgcgaaacatacgtattctaatgtgatgcgaagtatacatagttctttgtttactgaaaatactattattaattatttagtagagttaaccgcatgttggatgatattcatgattttatctggtacttatttactcattaagaagcatttaatttctaacaaaagtaaggcacttcgttggcaaaagtggcacgcaatgattggagttatcattgcaattccagtatttgtattagtcttaactggattgccatggtctggttttatgggcagtaaaattgccggtatgatggacacaaacggtgaccttggtcaaggtgaattagcgattaatccacctaaatcagatttgaacgaattaccttgggctacacgtaaaaataaacagccagcttcatccgaaaaaggttcaagtggtcatcatggtaatgcagcaatgcctcaaaccaaattagattatcaaatatctattgataaggtcgttgaacaggcgcaaaaagctggtattaaaaagccgttttcaatcgtatatccaagtgataaaaatggtacctttattgtatctaatactagtaattcaggtgttactgggctagatgtatcaccatacaaggaacaaacactttatttcgatcaatatagcggtaaaaagctaggtacgattaaatatgatgactacggtattattgctaaatggtttacatggggcattccgcttcacgaaggtcatttattcggcattttaaataaaatcattaatttatttgtatgtatcgctttattagtagccattggcatggggtttgtctcttggataaagcgtacaaaaaatactgcagtaaaagtaccacatcgcgtaaaaaaaccagcatctatatcactcataatatgtttaattgtattaggattattaatgccattatttggattatcacttatccttgtatttataattgaattaatattatatattaaagatcgtcgtgctaaacaataatgcacttaaagttttgaactgacgaaatttacaaaatgattctcgtctctctaattacttaaaacgggttctataataaatcgtactgatggaaagtttttactttttatctgtccgattttttgaatttgaagataaaaaagcatctaaaacgcataagaagataactctacttcttcaaaattacgttatagatgcttttttattaattcatatgcatgtcgtgaattttcatcattaaaccgtgtgggacgtcatcatgtttaacaatctcttgtttataaaatgtcttcccatcatctttagaaactaattttacaaagtctccttttttcggcttgaaatcattagatggttctactttgatattatgtttgactaatccatctttttcactgacaactttttctgcatttgtattactattcatataaccaaaataagtcgttttttgactagaaaaaatcattaaacatacaacggcaataccaataacaaccaatgcaatagataaacctagacccatttttttacccatttatagactcctccatttttcaaaaatacctattatcatgagaacttaattattactaattttagtcacgcattagaaacactttagttttcaatagttttacgttctgtctttttaccccagtattgataataagtacattctatatatccattaaataacttacgtcgctttgttgctttacgatctactaaatattcaaattctttattacttgttaaaatgtatgtagataaaaatggatgttgtttcattagtttaccaatataacggtacatttcttcaacttcttcacgatcaccaatacgttcaccatatggaggatttccaattaacgccaccggttcttctgtatcaattgttaatgtattgacatcttttacactaaatttaataatatcagacaacccaacttcttcagcgttacgcttagcaatctctaccatttctggatcgatatcagaagcatatacttcgatttctttatcataatcagccatcttatccgcttcatcacggtaatcatcataaatatttgctggcatgatgttccattgctctgatacgaactcgcgattaaaaccaggtgcgatattttgagcaattaaacaagcttctatagctattgtacccgaaccgcaaaatggatcaattaaaggtgtatcacctttccagtttgcaagacggattaaacttgctgccaacgtttctttaattggtgcttcaccttgtgctaatctataaccacgtctgttcaaaccagaacctgatgtgtcgatagtcaataatacattatcttttaaaatggcaacttcaacagggtatttggcacctgattcatttaaccaacctttttcgttatatgcgcgacgtaatcgttcaacaatagctttcttagttatcgcctgacaatctggcacactatgtagtgttgatttaacgcttctaccttgaactgggaagttaccctctttatcaattatagattcccaagggagcgctttggtttgttcgaataattcgtcaaacgttgttgcgttaaaacgtccaacaacaattttgattcggtctgctgtgcgcaaccataaatttgcctttacaattgcacttgcgtctccttcaaaaaatatacgaccattttcaacatttgtttcatagcctaattcttgaatttccctagcaacaacagcttctaatcccatcggacaaactgcaagtaattgaaacatatatgattctccttttatacaggtattttattcttagcttgtgttttttatacatttccaacaaatttaatcgctgatacattaacgcatccgcttactattttaaaacaaggcagtgtcattatatcaagacaaggcgttaattttaagtgttcttttcatgaaaaaagctctccatcatctaggagagctaaactagtagtgatatttctataagccatgttctgttccatcgtactcatcacgtgcactagtcacactggtactcaggtgataaccatctgtctacaccacttcatttcgcgaagtgtgtctcgtttatacgttgaattccgttaaacaagtgctcctaccaaatttggattgctcactcgaggggtttaccgcgttccaccttttatatttctataaaagctacgtcactgtggcactttcaaattactctatccatatcgaaagacttaggatatttcattgccgtcaaattaatgccttgatttattgtttcatcaagcacgaacactacaatcatctcagactgtgtgagcatggactttcctctatataatatagcgattacccaaaatatcacttttaaaattataacatagtcattattagtaagacagttaaacttttgtatttagtaattatttaccaaatacagctttttctaagtttgaaatacgttttaaaatatctacattatttgaagatgtatttgttgttgtattattcgaagaaaaacttttattgtcctgaggtcttgatgttgctacacgtagtcttaattcttctaattcttttttaagtttatgattctcttctgataattttacaacttcattattcatatcggccattttttgataatcagcaataatgtcatctaaaaatgcatctacttcttctcttctatagccacgagccatcgttttttcaaaatctttttcataaatatcttttgctgataatttcaatgaaacatctgacattttttccacctcattagaaactttgatcttcagaccactgtaagtcattgatgaatgctgttaattcatcgaacgtcacaatatcacaagtatagtttgttttatccataaaatcaactaacatctgcttgaagaacttaggactcgcctcttgttcctcatcataaatgagcaatgtttgatccgaatgttcaagcataaattgatctgcttgtttaaattgaaaaggaccttgatacgacgtatgaaaaatactatcaacataatctgcatgcttaattatgttggcatacttactttgattatgttcattccacttttctgtatgtccttggaacggtgtaattacagcaaactttaacgaatcatatgttcgttgtaattcaataacaacttctgcagtccataattctatacccatttgcccttgtattaacacccattctaatccttcatccaacagttgttcaattttatgttttataaattgttttaaataatgtacttcaggtgcgtcatctttaaaaatgtttaattcgaatgatttgtaacctgttacataaactgttttaaccatcagtaccctcttttgttacgccatctaatatattttgtaaatcatattgaacacttttaagcttttctataaataactttcgacttgttcgcttaaaatgacattcgacagaaagttgttcaatgttagcaatcagtagctcaaatttccttgaattcatataaggtacttctataataaattcacgatgtaatttgatctcattgagtatgctatcaatatgttcagtatatggctttacagtttggtaaaaatcatgatcttgttgttgtgatttcacattttcaaaattttgttgcatgttgttaacttcataaattagtgattcgactacatcattcatgaggacgcctcctacattttttaatttatcacaatatactgtattcgtcatgttttaacactctatataatttgatttaactattttttcaaatgtgttatctgttaaatcaagtaaatctaaaaacttcctatataaatacaaaattttatcgtgtatgttgttatacgatgaaaatacttttaatctaataaaatcatttaaatcaaatacacctctgctgattaacaacacatacttgtacttgcctcaaaaataaaaattactaatcatgatttgacttttataacaaaattcaaaaatattgtaatgagtattcatttttataagcaaaacttttcaattaattaaaattgtgtgtaaaattccaacattaacggtaaatgtattataatattattgtgttaatgctgaaatcacgttaaaataagctttggtgtattgtgtctttcgcatttatactaatttaagtttggtgtttcactataatgttgtgtataataaacaacgtttactaccaaacttgtgtggtgaaatttatgaattatccaaatggtaaaccatatcgtaaaaatagtgctatagacggagggaaaaagaccgctgcctttagtaatattgagtatggtggacgtggtatgtcacttgaaaaagatatcgaacattcaaatacgttttatcttaaaagcgacattgcagttattcacaaaaagcctacgccagtacaaatagttaatgtcaactatcctaagcggagtaaagctgtgattaacgaagcttattttcgtacaccttcaacaactgattacaacggcgtttatcaaggttattatattgattttgaagcaaaggaaactaaaaacaagacgtcctttcctttaaataatattcatgaccatcaagtcgaacatatgaaaaatgcatatcaacaaaaaggtattgtgtttttaatgattcgttttaaaacgctagatgaagtttatcttttaccctattcaaaattcgaagtattttggaagagatataaagataatattaaaaagtctataacagttgatgaaatacgaaaaaatggttaccatattccttatcagtatcaaccaagattagactatctaaaagcagttgataagttgatattagatgaaagtgaggaccgcgtatgacggaaaacaaaggatcttctcagcctaagaaaaacggtaataatggtgggaaatccaactcaaaaaagaatagaaatgtgaagagaacgattattaagattattggcttcatgattattgcatttttcgttgttcttttactaggtatcttattgtttgcttattatgcttggaaagcacctgcttttaccgaagctaaattacaagatccgattcctgcaaagatatatgacaagaacggagaacttgttaaaacattagataatggccaaagacatgagcatgtaaatttaaaagacgtgccgaaatcaatgaaagacgcagtacttgcaactgaagacaatcgtttctacgaacatggcgcacttgattataaacgtttattcggtgcaattggtaagaacttgactggtggatttggttctgaaggtgcctcaacattaacacaacaagttgttaaagatgcatttttatcacaacataaatctattggacgtaaagctcaagaagcatacttatcatatcgtttagaacaagagtatagtaaagatgatatcttccaagtatatctaaacaaaatttactattctgatggcgtaacaggtattaaagctgctgctaagtattactttaataaagatttaaaagatttaaacttagcggaagaagcttatttagccggtttacctcaggttccaaacaactataatatttatgatcatccaaaagctgctgaagatcgtaaaaacactgttttatacttaatgcattatcataaacgcattacagataaacagtgggaagatgctaagaaaatcgatttaaaagcgaacttagtaaatcgtactcctgaagaacgtcaaaacattgatacaaatcaagattctgagtataattcatacgttaactttgtaaaatctgaattaatgaataataaagcattcaaagatgaaaatttaggtaatgtattacaaagtggtattaaaatttatacaaacatggataaagatgttcaaaaaacattacaaaatgatgttgataatggtagcttctacaagaataaagaccaacaagttggtgcaacaattcttgatagtaaaactggtggtttagttgctatatctggtggacgtgatttcaaagacgtcgttaacagaaaccaagcaacagatcctcaccctactggttcatctttaaaacctttcttagcgtatggacctgccattgaaaatatgaaatgggcaacaaaccatgcgattcaagatgaatcttcatatcaagttgatggttctacatttagaaactatgatacgaagagtcacggtactgtatctatttatgatgctttacgacaaagtttcaatatcccagctttaaaagcttggcaatcagttaagcaaaatgctggtaatgatgcacctaagaaattcgctgccaaacttggcttaaactacgaaggcgatattggtccatctgaagtacttggtggttctgcttcagaattctcaccaacacaattagcatcagcatttgctgcaatcgctaacggtggtacttataacaacgcgcattcaattcaaaaagtagttactcgtgatggtgaaacaatcgaatacgatcatactagccataaagcgatgagtgattacactgcatacatgttagctgagatgctaaaaggtacatttaaaccatatggttctgcatatggccatggtgtatctggagtaaatatgggtgctaagacaggtactggtacttacggtgctgaaacttattcacaatataatttacctgataatgcagcgaaagacgtgtggattaacggctttacacctcaatacactatgtcagtgtggatgggcttcagtaaagttaaacaatatggtgaaaactcatttgtgggacatagccaacaagaatatccacagttcttatatgaaaatgtgatgtcaaaaatttcatctagagatggcgaagactttaaacgtcctagctcagtaagtggtagtatcccatcaatcaatgtttctggtagtcaagataacaacactacaaatcgtagtacacacggtggtagtgacacatcagcaaacagcagtggtactgcacaatcaaataacaatactagatctcaacaatctagaaacagcggtggattaacaggtatattcaactaatccactcaacataaaatcctcagttataccatatttatggtgtagccgaggatttttttaggttcttcatcttttatggtgggaaggtaaaacttcctgctttttttataagtattcatacgctattgctatattagtagaaaccgtaaaatcagtcattcacatacattttgaaacatctaaatagtttttcatattcacatctttagctatgtaaaattattgaatttgaataagtggttgttcccatttttaaaattatgattatattttctcatagtcatcttagacgctgttttaaattgatatatttattaattccctgtgtacgttaatcagtgaaatatcaacatgtttgcaacatattttcacaatcatagatataagaaatccacctacgattcgaaatagatatcttaaagcatatctcaagatatccattatgatgtagatggacagtttttatattaagacgttgtaatgacacgacacctaacataattataaatatgtgtgcatgaattagttttatatattttcaacattaggaaatgatcaatcttgtctatacctgcttattctttaaccttgtttgataactagcattcattttaatcaattcagttttaaaggtcttcatttgtcgatagcccataaaatgatatttacgttcaatcatataatcatatctttctttaaaattcattggcacaacaggatattgatttaatttatcaaaatcaatattgccagttatgtcattaacctgcttaaaataatcaataattttactatggtattcatccaagtagggctttgcttcactagaacctaatgtcttatttttggcaaataaatcaatctcttgttctaaattatcaaatacctcttttgtaatatttgtcatgttatcacgcttctttcaaactagctttataacgtttttgtccttctctacaatcttctaatagtggacaaatatcgcatttaggttttcgggctaaacagtggtatcttccaaagaaaatgagttgatgatggctcctattccatctatctctaggtatgacagaacataaacggtcttctacctgtctcacattatctttccaacgattaatacctaagcgtttagaaacacgttctacatgcgtatcaacagctaatgaaggttcatcaaatgctacactcatgactacattagcagttttacgtcctacacctgctaaactttctaattccttatgtgtttgtggtatttctccattaaattgatcaatcaaagattgacaaagtttcttaatattcttagctttgttacgatacagaccgatagaacgaatatcattcataagttcttcatcactgactgccaaataatcttcaggcgttttgtattttttaaacagctcagttgttactctatttactagaacgtctgtacattgcgctgacaataatacagcaatagttaattcgaacggattatcatgttttaattcacattctgcatccggaaacatatttgctataacatcaatcatttctaatgcttttttcttacttaccatcaaggttctccccgtttaaccaatcaaatttaggtaccgttttaactgtgtgcgtcattttcggtttattgaatttttctcttatttttctagaatcgtcaattgttttgacattgtttttcttccaattaagtaaaatacgatctatatatttaaagctaagtttattcaaactattcgcctcgtctaatgccgcttgtataattgcagtatcgtgtttatcaacatcaatccattgatttaacgtttctatttcatatggagataacggccttgcaaatgtatcctctaaaactctaaataattgtttaaatttttctttactatttagctctttcgtttccatactttgttgcttcaatatatgacttaatttttcgaaaaaaggatctagattcatatattcggtaaatctaccttcttcatctttttgaacttgtaattctagcaattcacgttgtatcaaattttgaataaccattgtaatatcacgtggttgcatagttgagcccttctgaagcaattcaattgaaggctgtttatttgatgtttcggaagcataaatcaatttaagcaaaatgactaaatcttgctcatctaaacctaagtcactgtaatggtctaataattctcttcgtatcactacaggtcttgcttttaattgatatttatccatgttcgtgcccccttttaaatttaaccattacttaatagtataaatcattttctttaattttcgactaaaatgcttaatatatttaactagtagcaaacaaattttaaataacagtattttttaacactagattttaacaatgaactttatggataatcagatgaactatttattttccaaatatagttactaaacaaaagtttgttcatgattaatataagccgttatcaatcttcattttccaagaataaatcgcccagctattaatataggctggacgattctttttattatcataatatatattttaagtaacgaccctaaaacttatggatataaacggtttaataatcttgggaatggcgctgtttcacgaacgtgttcaacaccagaaatccatgctactgtacgctctaaacctaaaccaaatccacagtgtggcacactaccataacgacgtaagtctaagtagtaactatatgcttcttcgtctaatccatgttctttaacgcgttgttctaacaattctaagtcatccacacgttcagatccaccaataatttcaccgtatccttcaggtgcaattaagtctgcacataatacagtttcttcattttcaggatttggttgcatatagaaaggcttaattttagttggataattagtaataaacaccggtaaatcataatgattagcaatggctgtttcatgtggcgcaccaaaatcttcgccccattcaatatcatcaaagccttctgcttttaagaattcaattgcatcatcatatgaaattctagggaatggtgtcgcaactttttcaagttttgatgtatcacgctctaaaattttcaactctagtttacaattttctaaaactgattttacaacatgtgttacatattgttcttgaatttctaaactttcagcatgatttgtgaaagccatttctccttcaatcatccagaactcgatcaagtgtctacgtgtttttgatttttcagctctgaaagttggaccaaatgaaaatacttttccgtgtgccattgctgcagcttctaagtataactgaccactttgagataaaaacgcatcttgatcaaagtatttagtatggaataattcacttgtaccttctggcgcacttgctgtcaaaattggtggatcaacctttgtaaatccatctttgttgaaaaattcatacgttgcacgaataacttcatttctaattttcattacagcatgttgttttttagaacgtaaccataaatgacggtgatccattaagaattctgtaccatgatttttaggtgtaatcggatagtcatgcgcttctgaaataacttcaattgatttcacttgcatttcgtatcctaagtcagaacgattatcttctgtaattgtgcctgtaacgtatagagatgattcttgagtaatttctttcgcaagtttgaatacctcttcatcaacttctgatttaactactacgccttgcataaagcctgttccatcacgtaattgtaaaaaggcgattttaccacttgaacgtttatttgttaaccaagcaccaattgtaacgtcttggtttaaatgatctttcgcttgtttaatcgttgttttcataaccattctcctatttattttttcgttatacaatactcattcattttaacaaaatccgctttcaagttctagaactagactaaaagataacgtgtaaatggtaatgatttacgcacagatttgaacattaatttatattaagacaatacaatcatcagtttcagacaaaatatataataaagcctcaatattattagtatgaaggtcgttttttgtgctaacattcaagtttaattataaaactcaaattttgacgaccaaacaaaaattcttgtaacagaacatagcacatgtcatgtcacaagaattttactttgtatttcactttttctttttttgaatttgtcttaataattttccaaactgttgaatgtcgccttttttctgacgataattttcaagtgtttgttcaaaaaagtttttataattactgtttatgagtcgatcatcaaatgaaactattatgccgcgatcattttcatttctaattaatcttccaagtccttgtctaaaacgtgtaactgcatcaggtaatacatattccttgaaagttgaagtgaattcagaatccataagccaatattttgcattatgcttgttcataaacggtaacttcgctatcatcacacatttaataccatttgcttgaaaatcaaaaccttcaaaaaatgttgacgtaccaagcagtatggccttatcaaaattattaaactgttgtactattttataattttggttctgctgttgtgttaatacaacataatcttcaaattctggcaattcatttagcatatcttgtaccatatgcatcattttataactcgtaaataagactaaacattttgatgacgttatagtcgtatattcaataatatagcttacaatcgatgctacatactcatctatatttttatattgataagatgctacatcactcggtataaatacacttgtattttttgcactttgtaacgacgtgttaacttcaaatgtattaaagtgaacatctttgttgaataactgtttaaaagcttcaaacgaatgattaaattttaaagtaccagatataaaaatgagtgatttaaatttttccaatacttgtttcgttaatacatcttttacagcgtaatctttcacatataaacgtattgttgatttttgagataaatttttaatcgaaatgaaactagtatgtccagcttttaaactttgttcgatatttttaaatttatcttttaaatacaacaactgtttccgtaatgatttaactgttttatgactaatgccattgaatatttctagcgttttatttaacttatcgataatcgcatgtaaatccttcaaaatgtcttttgtttcaaaagtaaatacattatggaagcgatgaatatcatcatcataaacatcagaatcattgataatcgtaaatatcgttgagaacaattgctcatttaactcatgaatctcattcatactagccttcaagccaaaaatatcaattggtgcaatatctaatttttccaaaattcgctgcttttccagttgatcaattgcctttaacaatttttcattttcgtttttaccaatcaaaccaagctgatatttaatatcagcataactcaactcatttgtcacttgatttaaggcatagtctggtaagcgatgtgcttcatccactatacaatcatcaaacaattgatatattgaattttcaacatcagaatgaattaaatgtgcatgatttgtaataccaatttgaatgttctgtgcatttcgcttaataaaattataataatgaacatcgtgacgtgccggtacatatgtttcaattttctggtcaaaatacatcttttgaccaccttttaaatttaattcctgtatatctccggacggcgtctctgtaatccaaatcagcaattgcattttcaagatattcacttcgtaattacttgtgtcatcttttaaaatttgactaataagccccaatgaaatgtaatcacttttacttttaatcaatagtgcattaattttaaaattcaacgcttcattcattgctggaatatctttttctaacaattgactttgcagtaatttagtattggtagaaatcatgacatgcttcccagtttcaatattatacatcaaggccgcaagtaaatatgctaatgatttaccactgcctagtgatgcttcaatcattgctttttcactatgcatgagctgatctaatatagtttccgctaaatataattgttgcggtcgatatgttaagccaagttgatctacagctttgctatataaagacttcaagctgccattataatttgttgtcggctttttaaaatcaacttgcttacgatagataatctgttcgaacttttcgtacgatttatccaatggctttgcatcatattgcctaaccatctcaaagaaaatatcatacaaatcgtatttcaactgtttacttaaataatataattgcttcaaagtatctaacggtaacttttcaaatttttcaaaagctaatatcatcaatttagcagtagtagcggcatcttcgtcagctcgatgggcatttgctaaggtaataccatgtgcctctgctaattcacttaattgatagcttttatctgtaggaaaagctattttaaagatttctagtgtatctataacttttttgggacgatattgaatattacaatctttaaatgcctttttaataaaattcaaatcaaaatctacattatgagctacaaaaatgcaatcttttatcttatcgtagatttcttgtgcaacttgattaaaatatggcgcttgttgtagcatattttcttcaatggatgttaacgcttgaatgaacggcggaatctctaaatttgttctaatcatagaatgatatgtatcaataatttggttattgcgcacaaacgttataccaatttgaatgatatcgtcaaaatctaattggttgcctgttgtttccaaatccacaacggcataggttgccatacccatagctatctctccttgctttagtgttaaaaatctatatctgcactaattaaacggtgtgattcacccgcttcatctctaacaattagatagccatcgtaatctaaatcaattgcttgtcctttaaactgtttatcattttctgtaaatagcaacgttctattccaaatattagaagctgcagtatattcttcacgaatttcagaaaaaggtaacgttaaaaattgattatatcttttttcaatttcttgaagtaatatctctaaaaattgatatctatctaatttatttttatcatgtaattgtatacttgttgctctatgtctaatactttcatcaaagttttctagttgttgcgtcaaattaatacctataccacatattattgcttctataccatcattattagcaaccatttcagttaagaaaccacacactttaccattatcaataaatatatcattcggccatttcactttgacttcatcttgactaaaatgttgaatcgcatctcttatccctaatgcaataaataaattaaatttagatatcattgagaatgcaacgttaggtcttaacacgacagacatccaaagtccttgcccttttgaagaactccaatgtctattaaatcgcccacgacctttcgtttgttcatcactcaagataaaaaatgaagattgatttccaacaagtgactttttcgcagcaagttgtgtagaatctattgaatcgtatacttcactaaaatcaaacaaagcagaactttttgtatattggtctattataccttgataccaaatatctgggagctgttgtaataaatgccctttatgatttactgaatctattttacatccctctaactttaattggtcaatcactttttttactgcagtgcgtgaaatattaagtgattccgcaatgctttgtccagatatataattcggtttatttttatagagtaattgaagtacatcttgactatattttgacatgattatccacccatttcaaaatttcagtttcttcgttgcttactttacctgttacaatcgctatctcaatttgtcttagcacatcttttaaccacggaccacttttggcatttaaatgtgccataagtacaccgccattaaccatcatgtcttttctattatgcataggtaaacgatgtaatgtttcatcaatcgtttgaaggttaacgattaatggttcatgtccttgaatatcatttgcctttaacacgtctgctgcaaccattacatttttaatgagatgcgtatcataatcataaacaaacatttttaattgttcttttgtaataatacttggtaatgcattcataatttgaatatattgattgatatcttttacttgtcggttacttagctttaaaggcttcaatgagtaattaatatcaaatttaactgatactatagcaatcaacaattctaaatcaattgcttcagttacattaatttgattcatatcaagatgttcgaaatacggcatataattaaatgctttcagcgattttaaatgattaaaactcttttcaacattaatacctcgcattaatttagttagttcaatcactatacgctcaattgataaaaatttaatatctgccatttgtatacgcatcgcttcgaatgtttccgttgcaatatcaaatgataattgtgactggaaccttaaacatcgaatcatacgtaaagcatcttcttggaatcgttcctcagctatacctacagttcttattattcgattattaatatcttgttgaccatcaaaataatcatacaatttgtatgctgtatccattgctatcgcattcatcgtgaaatctcgtcgttgcaaatcttcgtataaatcacgaacaaatgtaacaccacttggtctacggtgatcgacataatcttcttcagcccggaatgttgtcacttcataattttcatcattaaaaactacatttatcgtgccatgttctttacctacaggtatcgtatgactaaagatagattctatttcatccggcgttgcacttgttgtgatatctatatcatgaatatttcttcccatgacataatctcttacagagccacctacataatatgcttcaaaaccattgtcttgaatttgttctaatataggccttgcctgttcaaataatgatttatccatattattactcgcctttacttttgttatgctcatttagcattttttgataataatactcatattgatctgtaataagttctgatccaaaacgttcagcaatatctgctagcatgtttttctgaagtttgttgtataacaccttatcttcaagtaatcggatagcatagtcactcgctgaatcacaatcacccacatctacgacaaatccagtttcaccatgtttaataacctctttaattccaccggcatttgaaccaattggaacgacgcctgttttcatagcctcaagtaaagttagtccaaagctttctttttcacttaataataatactaagtcagataattggtaaaattcacttacgcaatcttgtttccctaaaaataaaacatcctcttctacgtttaactctttcgtcaattgacgcattggcactaattcaggaccatctccaagtaaaattaatttactaggtatcttttcacgtacttttgcaaatgtttctataatagtatctatgcgttttacttgtctaaaattcgatacatgtattaacactttttcatctggtgctataccaaattgtgattttaatgctgtgttatgtttagttggaaactcattttcacgtacaaaattataaatcggtataatttctttgttagtttcaataatttcatgtgtttcttgtgctaaagatttactcacacttgtcacaatatcacttttttcaatgccaaatttaattgcaccttggagtgaatgatcatagcccaaaacagtaatatcagtaccgtgtagcgttgtcataatttttatatctttacctgacatctcacgagctaaaatcccacaaattgcatgaggtacagcatagtgcatatgcaacaaatcaagatcatattctttaataacttcagcgattttagtacttaacgtaatatcatacggtggatactgaaatactgcatattgattcacttcaacttgatgaaaaatcatattcggtaatggttttcttattctaaacgggatatttgaagtgataaaatgtacttcgtgacctcgctctgctaatttaattcctaattctgtggcaataattccagaaccacccatggacgggtaacatgttatacctatcttcattcgcttgcccatcctttctttctatttctctctattattctcgatgcgtagataattgtttaaatttaagtttatagtaatgttgagtttataatttcatatatctaaaaacaggtgttgtatatataatcattcatctagttatacttactttaaaaataatataatttcatgcgatgcaattcattgatggatgtttttaatcttaatcaaatccaaataaagcatatatttttaaattcactttctttcgaatcgatttttatctcttgtattaaacttttccattgtttcattaaagctctctgtcatatctattcccattgaattcgctaaacataacaacacaaataaattatcacctaattctgctttaatcgtatttgcttcctctgaatctttcttctttttttcaccataggtatgatttatttcacgtgcaagttcgcccacttcttcagtcaatctagctaagttagctaatggtgaaaaatatcctgttttaaattgtccaatatattcatcaacttcacgttgcatttctaccattgatttcatttctacgttctccttatattgcatttctaatatagtatatatcaatttgaagtctcatgcatgtttagtgcaatctactgactctagctaaactagatgacaagttgtttattttagaagtttaataattcagtttatataaatgtaatgcattcctaactaaattaaatcaattgaaattgggattataactttatgatacgtaccactacaataaaataatatagtgaataatctaccattagaaaaataagcacaaaaaaactagcaaccacacaaaaatgtgattagctagttaataagtgtctaatttaagttaattgttaatctataagattaatcacttgaacgcgcaatcaaaataatacgtacaagctctgctacagcgactgcagttgctgcaacataagtcattgctgctgcagataatactttacgcgcatgcttgtattctttttcatttacaatgttcaatgccgtaatttgtttcatcgctcttgaactcgcatcaaactcaactggtaacgtaacaattgagaataataccgctaatgacattaaaccagcaccaatccataaagcagttgaaccaaatgcactacctatcgctgttaagataatacctaacatgatgatcatataacttaatgaactccctaggtttgcaacaggtactaatgctgctctgaatcttaagaaccaatatccttggtgatcttgaatggcatgaccaacttcgtgggctgcaattgcagttccagcaactgatggtctgtcatagtttgcaggagatagtgaaacaactttctttttaggatcgtaatgatctgttaagaatccttcacctttaacaacttcgacatcataaataccgtttgcatgtaaaatttctaatgcaacttcacgacccgttttaccactagttgatctaacttgtgaatatttctcatagttagatttaactttgtgttgtgcccataaaggaagcaccattaatattacgaaataaattatcatagtaaaaattgaagacaataaactcactctcctttataaatattttactgtcatttgccgtttttatcaaatcatttacactttaataatttgtttaattcaatataaagcaaaagtccaaaaacacttagacaacatgataatacaccaatttgccacacatgtgtagttataaaatcataatatggaaattgaaggtgaaaatagtcaatataatcattcaaaaacacccaaatcatcgctacactgattccaatcatagaacgtttaaacctaggatagaagtaaattgcctgaacagccattatactgtgggaaaacattaataccaaaccatttactgtaatatcaccttgttcaataataaataatatattcattataactgcccaaatcccatatttgaataatgttacaaatgccagtgcatcgataatactattttgtttttgaattaatatcaatgagatagaaataactaagtataatattgcagttgggctatctggaacaaaaatcttaaaatgccagggcgtatgacttaattgttcaccataccatatataaccataaatcatccctaatatattacaaatgagtagcatcattaaccaagaacgttgataaagtgtatattgccaaaatgctttaattgtcatctgctaagtcctcaaattgattatgtttatttactagcttgagtgtatttaaaatttgcgttagttgataaaaacgttgcttttcattcatctgtaaacttaaatcaatattgtgtaacaagtaatctattaataacgcatgtttatgccgatctatagccatactatttaagtcatgaagataagtttgataactgggcgattccgttagttgagcaactattaaatcatctagcctttgctcacgctttgacacgtttgcgaagtgaatttgaatatcaaaagcacagttatgattagcgatataatcaaatatttcatttgtattcattaactttatattacgcttagtaaattgaattgcagaagcgtgacttcccacttctgcaatttctaatgtttcatgatgattaatttttgtatctacaaaatgaatgtttgccaatttcgcctcattcacttttatatagttaagcacccaaactgcaatacgcgacttaaatcgatattgaaaaagtaaatattcaataaaactttctttaatttgattgagtgtctctgacatcaaataccccattttaagattgcaatcttgataattcgtcatgccaattttcgttacttggctctagttccaacaattgatttaaaatagtaattgcttgttccttttgaccaatttcaattaaatagaaataataatcactcataaaatcaatatttgttttcatcgttggatatgctaattcaaagaaatgttgagcttctttatctcgctcttcttgaccataggcgaacgctaaatgccacatgaatgtaggatccaaatcttcttcatctacatatgttaataattcaatgattgcttcataatcttcttcattacgatataaatcgcttaaaatcaataaaggttcttggtaagcattatcaacctctaatgcttgttttaacaataatacaccttcattagcatcgccgtgttctatttccaaacatccagttgtatacattaactctttataaaattgacttagtcgtaatccttctttacccgtttcaatggcatctggataatttttttcattttcatataatgattgtaaatacaagtagccttgaatataatcaggatctttagaaagtaatgtagtcattattttaattgcttcttgagtgatgtcatttttatcgtaagaaatggcttttttgagataatcttctgaagtcatttcatcttcattaatttcatcgtataagcgaatcgcatcactatagttaccactttgtaaactacaatctgccatacgagagaataagtttacaccattaacttgatattcaccagtttctaaaacggtttcgtattcagaggtagcacgtaaatattgaccatcataatataacatttcagccaatgcaaaatggattattggatcatttggctctagttcaagtgcttcttgtaatttatcaatagcaacttccatcatattaatttgttgatataaatctgcttctaacatcaacttttcaggtgatggttcaacataacttaaatattctaacgcttcgtcagtttgattttcagacattaaaccttcaataaaataaatcagcaattcactttcgtctggatatttgtgatataacacgcggaatacttccaaaccttgtggcattaatccaaaattgtaaagtgtctctcctagaataaataatgcgtcatcgttgtcagtagttattgcttcattaacacgagagtctaaattttctagtttttgtagattgatatcgtctattaatttatagatatcttccattttatattatccctcattttctaaaagctttagttttggtaaaaatcctggaaatgatacatttacagcatcaaattgtttgattttgacaggctcgcttgaaagtagagaagcaactgcaagcatcattcctattcgatgatcagttaaactatcaactgttgcatttgttttaaattctgacggatgaataatcaatccatcattagttggttgtaattcaaaccctaacaagtttaacatatcagccgttgtatcaattctatttgtttcttttacttttaattcctcggcatctttaattgtactcgtgccaactgcttgtgtacaaagtaatgctattacaggcagttcatcaattgcttttggaactaattctccttcgattgttattggttgaagcattggtgtgtattgaatacgaatagaagcagtaggttcagcaccagttgtttgattgaaaagttggatattaccgcccattttttcaacaatatcaataatacctgaacgtgttggattgattccaacattatgaattgttacatcacttcctggtgtgataagtgctgcaacaataaagaacgctgcagatgaaatatcgccaggaacatgaaaatctgcaggtttaatgtatcgaattgcttcaggggttgtattaattgataacccttctgcttcaattggaatattaaaatgtttgaacatcgtctcagtatgatttcgacttacatctaattctttaatgatggtcggttccttagaaaacaaacttgcaaataaaatggcactttttacttgtgcacttgcaacttccatttgataatttataccttttatgacagatggcttaataattaatggtgtataattatcttcaataccttcaatattcgcatccataagtttcaatggtctcaagacacgatccattggccttttaccaattgaaacatcgccagacaaaacactttcaatacctaaaccacttaacaaacctgccaataatcgtgttgtcgtaccagaattacctgtatacaatacttgatgtggcgtgttaaaagattgatatcctggggaagtcacaactaatttttcatcatcttctttgatttctacacctaacagtcggaaaatgtccatcgtacgacgacaatcttcgccaagtagtggcttatatatagtagatacaccttcagctagcgacgccaacatgattgcacggtgtgtcattgacttatcgcccggcacttctatttcgccctttaacggacctgaaatatcaatgatttgttcatttaccatttcattcacctacttaaaatatgtttttaattgttcacatgcatgttgtaatgttagttgatcaacatgttgtacaacgatatctccaaattgtctaatcaagaccatttgtacaccttgcttatcattctttttatcacttagcatatattggtataacgtttcaaaatccaagtcagttatcatgtctaaaggatagccgagttgtattaaatattgaatataatgattaatatcatgcttagaatcaaacaaagcattcgcaactataaattgatagataatgccaaccatcactgcatgaccatgaggtattttatgatagtattcaacagcatgaccaaatgtatgacctaaatttaaaaatttacgtacaccttgttctttttcatctgcaataacaatatccagcttcgtttcaatacctttagcaatatatttatccataccatttaatgactgtaatatctctctatctttaaagtgctgttcgatatcttgcgtcgctgattcaccattcaataacgcatgcttataaacttctgcatagccacttaatatttgctcaaatggtaacgtctttaaaaagactaaatcataaatcacagcagttggacgataaaatgcaccgataaggtttttaccttgctttgagttaatacccactttaccgccaacactagaatcatgcgctagtatagtcgttggcacttgtataaagtgcacgcctcgtaaaagtgtcgccgcaataaacccagcaaaatcaccagttgcaccaccaccaacagcaataattgctgtattacgagttacatgatgggataaaatatactctaatgtttcttgatattgctcaaatgttttcgtcttttcaccagctggaataataactttatgtacattttcatatgataaaatatcatcaaatttatcagcaaaatattgatttacatgctcgtcaattaatataaaactttgatcaaactgatcaatatacgtgctaatatggtcaattgcaccgtgttcaacatatattggataattatttgaagggtatgttgtttgtaatttcatgattacacctcaattgttcttgttgttaaaactcaatatttaattgtctgcgctcaataatttgttgtttaagttgctcaatatgatttgattggaattcttccaataatgcttttgctatttcaaatgctacgacatgttcgcagacgatacttgctgcaggaacagcacaactatcagaacgttcaattgttgctttaaagtcttctttagtattaatgtctactgaatttaatggtttatataacgttggaattggtttcattacaccattaacgataattggcattccatttgacataccgccttctaaaccacctaagtgattagatccacgataataaccaatttcactattatatagaatttcatcttgaatctcactacctggcttttcagctgctttaaatccttcaccaaagcttacacctttaaaagcatttatgctgacaacaccttgtgcaatcttaccatctaacttacgatcataatgcacataactacctacaccaacaggcatattttcaactacaacttgaacgacaccgccaattgaatctccttcatttttagcttcgtcaattttatctcgcattgcttgtgcgatactgtcatcaattacacgaacatcattacgatcaagatttgctttaaatgtttctgaatcataaaaatctttatctttaattccacctatttcaacaacacgactgtatatatcgatatctaactgttgtaataacactttacataaggcaccgactgcaactcgagctgctgtttctctagcagatgatcgctctagcacatttcgtaaatcacgatgattatatttcatacctccaaccaaatctgcatgaccaggtcttggttttgtaatagtacgtttcatattttcacgttcttcttcacttattggagctgctcccataatttttctccaatgcgtaaagtcatcattggttacaaccatagtaattggactacctaatgtataaccatttctaacgcctgatactatttctactgtatctttctcaatttgcatacgacgtccacgtccgtaaccgccttgacgcttaaacatttctttattaatatcctcaaccttaatttctatatttgcaggtacaccttcaacaataactgttaattgaggtccatgtgattctcctgatgttaggtatctcatacacactcgctcctttcatacttccacgataacattataatatgttgttaatcttatcatattcattgtgcattcataaatgtttgttttcaagctcaattaagaaaatggatgacatctcattttaaatgtcagaattatcttaatattaaacgaactaaaattaattataatatattcgtctgtagaaaagtatcatgaatttctaaacagttgcatcatataatcattaattaaaaatgattagccgttttaatataatcgtatcgcaactttagcaaataatatactgactacatttcttaatacaaaagaacgaactgttaattattaataaagttaatcagtccgtttaaaaaaattatgatattaaaatatacatatgttaagcgcttttgttatactttgacttcaaaaatataatcaattcttttactaatacataaaaaatataaatgagagtcagtataaaaataatttttgttataggattaagtggtttatctaaaaatatagcaccatatagtaattccattaattttaagaacattaaaatccccaaaataatcgaaataatattcttcattttaacaaccccttctctctgtttagtttcatttgataaagaatattcctctctttttaatacgtgttaccaaaaaactataaaatttttcaagtaatttactacaacataaaaaacgggccttgttatgtataatcataatgactaaccacataacaaaaccctttctacctttataaataaatcgtaaaggtttacagtttatattttattcatataaccatgcatcacgtggtgaagcatagctagtaatttcattttcattaaaccatagattaatttcacgttcagcagactctaatgaatctgaaccgtgaatgatatttctaccaacagttaaacctaaatcacctctaattgatcctggtgaagcttctgaaggattggtgctgccaataatatgtctagatacattaactgcatcttcaccttcaactaccattgcgaacactggtgctgatgtaataaatgaaattaaatcattataaaatggtttaccttggtgttcaccataatgtgtttcagcaagttccattggtacttgcattaatttaccaccgacaagttttagtccttttctttcaattcttgaaattacttcaccaattagatttctttgtactgcatctggtttaatcattaaaaatgtacgttccactttatgtatccccctgtgtttaataggtttatgtatattactattatatattaacaggttggtaaagcgctttcaatacttttcataaatactacgtgtttcttgaacccatttttttcgtcaaacttaaaagtagtgatttcggatgtccatctggtaactcagaaatcaaattcaaagctttacttaaatacttcgaacttactgccttagcctcatcgatgctgtcagattttctaatgatttggatacattcttcaaattctttgcgttcactatcacgacgtaactgttcgattttcaatttgaagtctggatttttacgcatttctaataaaatcggtaacgtaatatgaccattaagcaaatcacttccgaccggcttacctaatttcttttcggtacttgtgaagtctaatacatcatcaatgatttggaagctcatacctatataatgaccaatcattttcaattttcgtacagtctctttatcagattgagaagtaattgcaccaacttcagttgatatttgaattaacagtgctgttttgcgattgatacgtcgtaaataattaataattgtctgttgactgttaaattggtcttgaaattggaaaagttcccctctacaaacatcaacgatagattcagatatcaattgatgtacacgattatctttaacggccattaagtgttcaagtcctaatgccaataaaaaattcccagttaaaatagcagttgtctgatcccatttctttgatatggttaacttgcctcgacgcttgtcgcttttatcaataacgtcatcatgaacaagtgttgccatatgaattaactctaatgcgactgcaacttgatacgtttgttcagacgtttgttcatctttgccaaattggctactcagaataacaaatgctgggcgtactcttttaccaccagaagacaataagtgtaatgatgcctgttctaatacagaatctttactttttattgccttttcaagtcgttgttccactttcttaatttcattgttcatgtttaactttgccacgttaatcacctttggtattatctttttctttatagccaaggtgcattgcagcaacgccccctgtaaaactacgtactcttacatttatgaaacctgcttcttcaaacatgcgcttcaactcttcttttccaggaaaattaaacgtagattgctgtaaccattcatattcttcttttgattttgcaaataattttccaaaaataggcataacaaatttaaagtatagtgcatacatttgtttaaagactggcaaagttggttggctcgtttcaagacataccaccataccacctggtttaagtactctattcatttcttttaacgcgactaaatagtctggcacatttcttaatccaaacccaattgttacataatcaaaagaattgtcttcaaacggcaattccattgcatcaccatgaacaagtttaacattttccattgaagcagttttttcttttcctacttctaacatattctcactaaagtcaataccagtaacttcacctgttggtcctacagctttgcttaatgcgattgtccaatcaccagtaccacaacaaacatctaatgctttcgtcccttttctaacacccatgtctttcatgacgcgttttctccatactttatgctgctcaaaactaataatattatttaatctatcatatttttttgaaatattttgaaaaacgcgatgtacttgctctttatttgctttattgtcagccatgcttaattacctctactttttaaataacttttttggatatcgtgtaagtaatgctttacttcactttgattatatttcttgaagtatgatggatagtaatcagacatatcttcaaataaataattatatatttccgactcatcaatattgataccgaaatgagataacgtaatatatgggaaaagtgtttcaatttttactattgcttgagaaatttcataatcatttaaagcttgatgatgtaatgaagatttcaattcattaatttcaacaattgctttactaatttcattttgaaatgataaatcattgatttctgctagtagcgtataaaaatgtgcactaattaaatctccaatcaaaatggaatgtttagacaaatgattatatgtaatgtcatcaaggtgtctcattgatgtgtcaattgtgaggcatgccactttggcaacatctggaatatcatataaatcaagtaacttacctaaccgatgattaatattaatggattcatattctgatacgccctttaatctttcttctatttgtctttccaatttgctaacagttgtttccatgtctacacctcacgatattatcactattcatattaacattatatgtaagaaattaaaatcttttgaagcattaagattacttatcatttttaaatttcaatttaaactaacagtaatttatgtagcttttgtaattctcataataacctttacttcatttacattattcatctttttaaataacgtaaaatactatagtagacatggttaccttttaagtaaattcaacgctaacaattaatctcaatattcatatgtatattttgtagttgctatttttatcaaaactattatgtcatgtaatattttgaacgcttaaacaatgaatgttccaaagattaaaaacttagaagaacattacaatttatgtacaggttgtaagtattaaaagcaaaataaaaagcccttattcagggctttttaagtaaaattattttacagcatcttttaatgctttaccagctttgaatgctggaactttacttgctgggatatcaatttctttaccagtttgagggttacgacctttacgtgcagcacgttcacgtacctcaaagttaccgaaaccaattaattgtactttttcacctttagcaagtgagttttggattgattcgaatacagcatctactgctgaaccagcttcttttttagttaaatcagcttgctctgcaactgcattgattaaatctgttttgttcattagacattcacctcctgaggtttgataatgatatgtttatatcattatggtaaaactttaacacaagcattacataaatcgcaatcatttatgtggcaaaaacgttgaatttaagccatttctattcattttacgtaattattagccgtatatgtgtaataatacacattttattcagattttttatcgcgctccattaaatcttttacgcattcttttactgagatattttcaaataatactctatataatgcatttgtaattggcatatccacatttttttctttagctaaatgataaactgatttagttgtataaataccttcaacaaccatattcatttcagataatgcttgatccattgattcaccttgtccaagtttatatcctaatgtgaaattccgagaatgtgttgatgtgcaagtaacgattaagtcaccgataccacctaaacctagaaatgtcataggatcggcacctaacttttcacctaatctactaatttccgctaagccacgagtcattaatgcagcttttgcattatcaccgtagccaattccagctacgataccacttgctactgcgatgatatttttcaatgcaccaccaagttcaacaccaatcaagtcatcattcgtgtacacacgcaaataatcattcataaataaatcttgcgttaatttacttacacttttatcttttgatgaagcagcaactgtagttggttgcttgactacaacttcttccgcatgacttggccctgacaacacgccaatacctgcattatattcaggtgaaatagaatcttcaatcatttctgacacacgtttaaacgtcccattttcaatacctttagcaacatgtataaaagtctttttagaggtcagcttatcattaatttgagaagcaacttctcgcattgctttagtaggtaaagccattaagtaaatatctgcaaattgaattgctttggtcatatctgaagtagcgatgatgttaacatctaatttcgcgtattttaaatactttttatttgtatgacatgtatttaattcatcaacagcatcttgatttttaccccacatcaaaacatcatgtccattttctgcaagaacattggcaagggctgtcccaaaacttcccataccaaaaacggtaattttagtcattgttatcccccaatcgttaatttctctttcgagctataatatgaattggtgtaccttcaaaaccaaaagcggcacggatttgattctctaaatagcgtttataagaaaaatgcattaattctacatcattaacaaatacaacaaatgtcggtggttctatagcaacttgtgttgcataaaagacattcaaacgtctacctttgtctgttggtgtagggttcatggaaattgcatcagtaacaacttcatttaaagttgaactttgaacacgttttttatggttttcacttgcttcattgatgtaagggaataatgtacgtaatcttgtgcgttctttagcagacacaaaagcaatttgtgcataatctaaaaattggaattctttacgtacttcatcttcaaatttcttcatcgttttactatctttttccacagtatcccatttatttacgacaatcacgactgctttaccttgttcatgtgcatatcctgcaacacgtttatcttgttcaatgatgccttgttctgcatctatgaccactaaaacaacatttgaacgttcaatcgcttttaaagctcttaatactgaatatttctcagttgattcatatacttttccttttttacgcataccagcagtatcgattaaaacataatcttgtccatcataactatactctgtatcaatagcgtctctcgttgtccctgcaacattagaaacgataacgcgatcttcacctaaaatagcatttactaaacttgatttacctacgtttggtcgtccaataatggatagtcgaattgtatcttcatcataaggatcttcttcctcttcaccaaaatgagaaacaactgcatctaacaagtcaccaagacctaaaccatgtgaccctgatatcggatacggttcaccaaatcctaatgaatagaaatcatacacgtctgtacgcatttccatattatctactttgttaaccgctaatacgaccggttttttagatttgtataaaatttgagcgaccatttcatcgctttgtgtcaatccttcacgcacgttaaccataaaaataataacatccgcttcatctatggcgatttctgcctgcgctctaatttgtgtttggaatggtgcatcaccaatttcaataccacctgtatcaataatattgaaatcatgtgttaaccattcacctgaagaataaatacgatctcgtgttacacctggcgtgtcttccacaatcgaaacacgttctccaactattctattaaaaattgtagatttacctacattaggcctacctacaatagctactataggtttagtcataagctaacttcctctctttcttatatctttttaataatatcacatgagactgtgtattcaaaatgagtttattactgtaatgataaaaatcagcacttaaaactttatctttttaaacacttagttaaatttgtccacgttatcattccgagtatattttgttacataaaaatactccacatgcaatcataaacatgtggagttgactattaaatattaaattatagtttaagatttttaagtttatcaccaatcatatcgccaattgttggattatcttcttcttcgttttctaagtacgccttagtcgtagaaggatcactttcaacaacatcttcgtttggtaatgttgctttaatagatagtgatactctttcattctcttcatcaatacctaatattttaacatttacttgttgaccaggttctaacacttcacctggcgtaccaatgtgtttgtgtgcaatttcagaaatatgtacaagtccttgtacacctggtgcaatttcaacaaatgcaccaaagtttgccaatcttactacgacaccttcaatgacatcattttcgtggaattgacctttaatattttcgaaaggtgttggtaacgtatctttgattgataatgaaatacgttctgtatctctatcaatagatttaattttaactttaacatcttgaccaattgaaactacttcttctggtgtttgaacatgttcgtgagaaagttcagatacatgcactaaaccatcaacaccgccaatgtctataaatgcaccaaattgagttaaacgcgctactttaccatcaataacatcgccttcatttaaagattgtaataattgatcttttttagcatcgttttcttcttgttcaactgctttacggcttaaaatgactctattattttcaggatccaattcttcaactttaatacgaattgtttgtccatcaaacacagagaaatcctcaatgaagtctgttgaaattagtgaagccggaacaaaacctctttgtcctacatcaacaaccaaaccacctttaactacttctgttactttcgcttcgatgatttcattattatctaatttttcttgtaaataactataagacttctcagtttcaagttgtcttctagataagatgtaagctccagtttcattttcttcatcaaactcaactttagtgacatatgcttcaacttcgtcgccctcttttacaacttcacttgggctatcaatatgatgcgtagatagttgactaataggaataatcccattaaatttaccaccgttgatatgaacaacaacttgcttgtcttcaacttgttgtacctcgccagtgactttgtcaccttctttaatatcgttaatcattgattcattgaattcttcagtcatcttgtttgcctccttatacactacatatttataacatcttataaactgacagaattgtcaagaaattctacctcgattacattttgcgaaatagtcatatacataaatatgtcactttatcatattcaagtcgtcatatcgataaatatttattacaaccatttttgtatcaaagtaatacagtttgctatgtttatacatattttttgtataaaaattagcatagcttactattttgttttataagtctgtcatttcattgttctctacaagatatattatagtaaaattttatacttttataaaacaaaaagccacgcaaataagcaacttttacatttgaatagtaagaagaccgtatatagtgcatctttctcgaattattacataggacattttttgtgactaaatcagcttcttttgcaatatttagatttgtaacactcattttcttaccatttgtaaaatgctttatgaatgtaatgaattatttttggaattctaataattcacctttattatttctttttactttttgaaaaacttacacaattcactgacgcattaacttttaccaaaaataaaaaggcaactttcattcatcattgaataaaaatcaccttttaatttgagtaaatcattatcagcacattcattttgtatatgcgttaagcgttgcacattacaaatagatagttatgacttattagattatttaatttgactcaccatcgctaaaatttcgtcagtaacttcttcaatcgacttgcctgtcgtatctaatgtcactgcatcatctgcttttcttaatggtgatatttcacggttcatgtcatattgatcacgagcttcaatatcacgttttaaatcttcaaaatttgattcgatacctcttaattgattatctttatatcttctttctgctcgctcttcaactgatgcaatcatatatacttttaaatctgcatctggtagcactacagttccgatatcgcgaccatccattacgatacctttttctgcagctaactctttttgttttttaacggcgaatgaacgtactggctctttagatgcaacgtatgaaacatgttgcgtcacatcattatttcttaaaaagtctgttacatcttcgttatctaaaatgacacattgacctttatctgctttataagttaaatctaatgttgtttggtcaactagttttgcaaagtcctcagttttgtttaattttaaatatttgtatgttaatgcacgatacattgctcctgtatcgacataaatcattgatagttcgctggctacacgtttcgcaattgtactttttccggcagcagctggaccatctaatgcaatattaatggctttcatgcgtcatttcccttccttgtcgttttatgaataatattttatcataattaggtaaattaaatataggaggaaatatatgaaacatctacttgttattcatactggtggcaccattagtatgtcacaagaccaatctaataaagtagtaacaaatgatatcaaccctatttcaatgcatcaagatgtcataaatcaatatgcacaaatagatgaattaaatccttttaatgtaccatcacctcatatgacaatccaacatgttaaacaattaaaggatattattttagaagcagtaacaaataaatattatgatggtttcgttatcacgcatggtaccgatacgttagaagaaactgcctttttacttgatttaatattaggtatcgagcaacctgttgttattactggcgcaatgcgctcgtctaatgaaattggttctgacggattatataattatatttccgctattcgcgttgcctctgatgaaaaggcccgtcataaaggcgtgatggttgtatttaatgatgaaattcatacggcgcgtaatgttaccaaaacacatacgtctaatacaaacacatttcaaagtccaaatcatggtccgctaggtgtattgacaaaggatcgtgtgcaattccatcatatgccatatcgccaacaagcattggaaaatgtcaatgacaaactaaatgtaccattagtaaaagcatatatgggtatgccaggtgacatttttagtttttatagtcgagaaggtatcgatggtatggttattgaagcgttaggacaaggcaacatacctccaagcgcattagaaggcattcaacaattagtatctttaaatatacctattgtgctagtttcacgttcctttaatggtattgtgagtccaacttacgcatacgatggtggtggttaccaactcgcacaacaaggttttattttttctaacggcttgaatggtccaaaagcaagattaaaattattagtcgcgttaagcaacaatttagataaagctgaaatcaaatcatattttgaattataatgaatacgtaacataaaaaggtctatgtacaatcaatagtcatcaacctcatttgacatatcatgaatgtcagtcgttgtaaaactaagttatttagtacatagacctttatttttatgattctaagggcgtttgtttcttagctagcatgctttgagcaataatgcccccgtggaatttaccattttcaataaaaatggtattcgcatcgttccctgcagcaattacacctgcaatatagcaattttcgatatttgtttcgtatgtttctttattatacataggcgctgttccaaattcatttgtattaatttgaatgcctacagattttaaaaattcataatcgggatgataaccaatcatcgcaaatacataatcattgtgtatcgttttactttcaccatttacttcataagtcacagtatcttcagttatttgggtaacattagcattaaattccatgtcaattttttcatgatttactaatgctgtgaaatttggaagtatccacggtttaattgaaggcgaataatctccaccacgatatagaaccgtcacgttagcaccagctttttccaactccaaagcagcatcgatagccgaattcttaccaccgataattacaacatcttgatcaaaatacggatgtgcctctttaaaataatggaacactttaggtaaatccgcaccttcaacttctaatgtattatgctgaccataatagcctgtcgcgattgttaaaaatcgacattcataaacatctttcgtcgtagtaatagtaaatttattattcatttttttaacagttaatacttcttcaaatgcatttacttttaattgatgatgttttacaacttctcggtaataaactagcgcttgattacgtcttggtttactttcttcaacgataaacggtacgtccccaatacttaatttatcacttgatgagaaaaatgtttggtgagtaggataattgtagattgattcaacgacattacccttttcaataattaaggtatcaataccttttcttttttgttcaatagccgcacttaatccgcatggccctccaccaattatgatactttcaactttttgcattgtttcggcctcctttaatcccaaactattataacagttcagtgattgatgcgctaagtctgtgcttgaagatttatgatatatttttgacaatttgtttaatgtgaatagagaattgttagctacggagttgaataacactacaatttaatatgttgatttattttttattcttcctcgttaaatttgttgattgtggtgttttatctttttgatgactatttaaaaagttaaattgatatgccaatattcgagacaagaccttgttaaataacaaactttgaaaaatgaaaaaaccgctacatacttataagcgcaatttaagttctccaaaatatttagagatacttataatatgcacgtttgtatatagcagttcagttacaatttatatagttatattatggaataacgatttgttgaccgtttctaatattgttaccacttaaaccattggcacgtctaattttttcaacattttccggtgaacctgaaccgtagtattgaattgcgatacggtataagttttcttgaccattcactgtatgtctttggccaccaccttgacgttgttgttgctgttgttgattttgattagcttgttgttgattttgattattttgtgcttgattgttcgcttgattagcgttgttttgatcattatcagattcatctttagtcgctttgtcttgatcctcttttgatttatcactgtctgtagattttgatttatctttagaagcgtctttagatgtgtctttgtctttactttcatcagcattatttttatttgtattcgcgattttattttcttttgtaccattattatgattgtttaatgccatgcctccaaatatcgctaatgcaccgataattagtacagctgcaattaatggtaacaatactttggccatgccaccttttttacgttctttatctctgtcatgattgtcatgttcatcatggttttggcttgcattattagaggcatgtggttttgaagcggcagaagcacttttacttgctgcgcctccagccaaacctgctgttccagcaccgatcgctgcaccttttttgccattatgatgatctttagacttatcttgagacgctttatcctcagtcgagttattcgccttgccagaattacttttgttttgagcgtcatttgaatgtttcttagctttagaagcagccattgcaccagctgcacctgcaacacctgctgttccagcaccaatagctgctgcttttttaccattatgatgttctttaggttcatcttgatcttgttttacagaatcattatcatgttcattttttgatgtttctgattggttagcacctgttgtaaaatatggtttaggttgctgagattgttcagcttcactcttatcagaaactgttgaatgctcagtgttattttctgcatttttaatagtatcgtgtttatcattgtcttcgattggttctggatgtgatttatccattgcaaaagcattcttattataatattcctcttcatgttgaggtgtactgtcttgatggctaggttcttgactttcagtactgtgtgatgattcgacttgacgatcatctattgtgccagcctcattttgaacattgtcttcagatgtttgtgattcattgtgaacttgtttattatgattcgttgctaaatcacggcgtctttttcttctttgggcatttcttggcggaaactgttgctccgtattctctattgtatcctgatgttctaattctgattggtctttttcaacatcttccgtatggtcttgatgtgaatttgtgtctatcgattgacgatttttttcaaagtcatctttaaaattattagacatagccatcttcctttctattctattacaatgattttacataaaatatacccacatgacatatgtttatgtatatttttcaaaattatttcaatcatttttcaattgtgtatacactaattatagcttgtcaattttcttttagtaaagtaatactatctgagaaataaattttgcaacttttcatcaaatccaatacttctaattaccttcttcttatttaaaattgcgatatcagttatattagaatcattgtcacaacatcgatcttgtgccggtggatattcaccgaaaaattctaataaatacttccgtctacattgatccaatttgcaatagccaatcatgcgaaagaatcctaattgctttcgtttaaatgattgcttaaatatctgtttcaaggcgccgatactatagaatgattgcaacgttgtcaaaacggcttgtttatcgggagctaaaaattctcctatttcgaaattttgtacatcttcttctgttatcatatctgcaaataataacgtttctaaaatatatttatcgtccggttggaataaactaattgcctgacttagttcaccatcgcgacccgcacggccaatttcttgaatgtagttagaaggacttgttgaaagatgaaagtgaatgattgtgcgaatatcttttttattaattcccataccaaaagcactcgttgcgactataatcggaatatcattatttaaaaattgttgttgaactgtgtgtcgctcttgataattcatatcaccatgataaatacctgtaagaaaacctgaatcataaataagttgcgctaaattcagacacatctttttcgatgagacataaataatcgttggtcccgactgttgtagaaacggcagcaaccattcaattttatcttcatcatcatgaaaattaagatgcttaaagcttatatttgggcgattcattgtagttttaataacattgaattgaatcgctaacatttccgtcaaatcatcttgtaaatgcggtggtgcagttgctgtcaatgctaagacaaccgcttctttaaaatgctttgttacttttcctattagagcataatgtggtctgaaatcatatccccattcagataggcaatgtgcttcatctagaacaatcatgccaaagtctatcatagatattaatttaaaatttgacggttgcaggagaaattctggacttagaaagatgaagcggctatgtcgtaaacatttaatattatgctttttctcaatttcatccataccagagtgaatacatgttacacgtttttctccatttattttcaactgcataacttggtcatccattaaagatattaacggtgagataattaatgtcggcttacctgataaatacgtaggtatttgataacacaaactctttccacttccagttggaagtatacctagagtgtgttgttgagacattatactttctataatttcctgttgtcccggtttaaaactctcgaatccaaatttgtttcgtaaaatatcatgcaacattcagatcacctctttcaaatccaacgattaatacttttaattgaaaatatgataacgtgtcaaattgttctttgtaaaattttaatcgttcgccacgatgctgttgataaaaattcaaaaactggagttgatcttctagttcaacataatcatcgtaattagacatgtaacctttgattaagatttcaagtacatgatcttcgatagtattgattttaacttgttgttgagccgctatatcttccatcgtgaattgttcaagcaattttgtataagtaatataagtttgatttaataatgtaggtttcattattatttttgataaaatagtatattctccactttctaattcaaacatcattgtcactaaattattcatttcgtattcaaacaattgctgttgagatagcttttctattaaactaacttgctgtctcgtatacattggttcatcatagccttgcaaataataatgtaagtaacatggcccttttaaagttattgctttaaacaagttatgtagttcattttcaaaatcaatttgtaattggttttctttaatgtagttatagacaatctttacagtttcttgtatcttattattttgagagattggtacaaaatgaaaaacatgttgtttggtattagacatggtttgcactaatagttgaattgcttgaaatgtttgccccatgctttcaaatgtatatctaggatgcaacatgatttccatttcagcattaaattcattgattttttctaaaaatagctcaaaagacggatattttaatagtggtaaactgtgatataatgacaactgttgttgactacaagcgtcaaaaaaggtttggtgagatttcttaccaactaagatattgtaaatacttttatttgttttatagttaaatgtttgttgtaatgctgtttttataatgtgttgcaaatttaaccctcactctgtaaaacggataatttgaaaataaaaatgatgctgtctaaaattttagtcacattactattttagcatttttatcaaaggaggcgaagacattggcaaaatatacaatcgttgatatggatacttgtattgcatgtggtgcatgcggtgcagcagcgccagatatatatgattacgacgacgaaggtattgctttcgtaatccttgacgataaccaaggtactgcagaagtacctgaggaattatatgaagatatggaagatgcaattgatggatgccctacagattctattaaaattgcagacgaatcatttgatggggacgctttaaaatttgaataattgattttttagacaaatgttctatagaaaaagcaggcaagctatcgtttattgatagtcacctgctttttattattatgtgtatattattttgctttaatttgattaaattcttttcaagaaattcgcaagccttctatatagtaaaataaatacaatagaaataacgatacctttaataatattgaatggtataattcctgaaacaatgattactttaagattatttgcgatatcagctaagttaaatatcataccgtacaaaggtaatagaacgaaatagttcaaaatactcaacacgatagtcataacgattgttgcaatgattaatccagtaatcaaagattttgttgaacgtttatttttatagatggcgtaagcagttaataagaaacttgcgcctgctaaaaagttagcaaatggtccaactggatcgcccatactaaataagtagttcaataaatttttaaccagtgcaactacgataccggcaactggtccaaacgtaaatgtagctagtagtgacggtacatcactaaaatctaaagttaagtatggtggcaaaaatggtataggaaacttgataaaagttaacacaaacgcaatcgcgctcaacatacttattgtgataagacgtttattttgttgcatattcaattttctccttccattcatctcgtaagaataggaggattattgcacaacaaaaaacctccatcttctcccatccagactatactgtcggctctagaatctcactagatcagccactaatatgatacatactagcaggtcgcaggctttatttactgccggttgggaattacacccgaccccgaagatgaattttacattattaaatttaattctcattaattttatactatatatcacaaaacctcaataactatgcttaaattaaatcatagttacgtaattggagagtgatacattggtgatttgcgagcattgtttggaatgttgtttgcttgattaatttttgagatggcttttttgattctatcactcaattgagtaaaaatcgtcataaaatggaaagcaaattataagaatctagtaggttaaaaagttttatatcagtacttccatttatattattatttaaatcaccagaaattacacttaaaatcttctacttatttgccttcacaacaatagtagaattatctttttattcttgatctactcaatatacactattctccgttaaattttcatcattaattttattcttgatcaaacacaccatattctgaagtgctttcaccgttaaaatttggtttaaccgtatttattttattgtccgaaaattttatactaagctctataccgtttggtatctctttatctttttttatttcttctgccatttttattacattttcactgttactttttttagtatagttcttttttttactaaatagagtagtagttaccgaaactttagacttatcttttaattgcttcttaacatttgacaattcttttgaaaattcactgtcacttttgtttaacaatggttcaaaatagtctctatactcagctaaattataaggtatggccgaaatataaaaatattcattttcataaccactattttgcgtcttattaattgcttcttttgtaaatcctgtatattgatatttctcttcattatctttgaaaaatttatataatttatcatatttttctttttgtgctcgatattcaaacccactgagtactgcaccaactaaagtactcatatcatcacctttatccttacttcttaatgagctatcactgtcaataattgatttatcaaatggaatactcgcattaaatacgatgtcgtggtcatcacaatgcacgaatacttctacaccatcgccactacctataacatttgtagctttaacttttagaccgaagttatccataaaaaattgttcgcctcgcttagcaattttatctttatgcttctttgcaaattcaatcgcatctttttctgcaggtggttggaatccttgtcctacatattttgaagcatccatttcttctggtacagattttgtttctttgttggattcgttattggtagttgaacatcctgatagtagtatcgttgccattaagataaattttgcttttttaagcatatctcatcacctatttatgcgcttttaaaagtttcattttgtaaataattatactctcttaatttatttgtgtcttttagtttctctctatataaatcttcaaatacatctgcctgcttaaatcgtttttcgttaactgtaaagtcattatctttattgatgtcttgataaaccctatagctactcaattctgttaaatctctatcatttattttattcatcttcaaatgctccaaacgacactactttcttatcatcaaaacgagctttttttgtgccaataagtttatttcctaattgagtagttatagtattcttgattggcatatcttttgttctttcaattttctcggataaatctattacattatttatcttttcttttctattcctttcatcattcgtactaaacaacgttgctacagtatttgtattagcagtatagtttagctcttttctagctcgttgcataccttctttaaactctttatcatttttatgtatcaatggttcgtaatattttctatattcttttaaatttcttgataaatatgtaatataaaaatattcattttgatacccgacgttttgcgtcttgttaattgcttctttagtaaaacctgtatattgatattgcttttcattttcttttaaaaatttatataaattatcatacttttctttttgcgctcgatattcaaagccactcagcactgtacccaccatcatactcatatcatcaccgttgtcattactacgcattgatcctttttgatggatggcatctttgtacaaaggtagacttgcattaaatacaatgccatgatcttcgcaatgcacataaacttctacaccatcatctttacctacaacatttgtagctttaacttttagtccaaagttatctttaaagaattgttcacctactttttcaaattctttacgatgcttcttcacaaattcaatcgcatctttttctgcaggtggttgaaagccttgtcctacatattttgaagcttccatttcttctggtactgattttgtttctgtatttgtttctgtatttgtttctgtatttgtgtctttttttgattcattattcatcgctgaacatcctgataacagtagcgttgctattaagattaatttcgcctttttaaacatagctcatcacccatttatgtgtttatatagaatattaaaaagcattttaaaaaaaatttattcatctttacgatacactccatattctattggatcattatcatcataaaaggcttttttagtattaatagtaggctttcctatttgaattgtaattgtagatttttctggcttatttttaaaattatatagtttatcactcagttcaattacatcatcaactgtattgtctttagtaaaattttcctttgtactaaacaatgttgttactgtatctgtattagcagcgtaattcacttcttttctggcttgttccattccttctttaaattctttatcatttttatgaatcaatggttcgtaatacttacgatattcttttaagcttcttgacgagtaagtgatataaaaatattcatttttatatccgacattttgcgtcttgtttattgcttcttttgtaaagcctgtatattggtatttctcttcattatctttgaaaaatttatataaattgtcatacttttctttttgtgttcgatattcaaagccactcaacactgtaccaactaaagtactcatatcatcgcctttgtcctcacttcttaatgagctatcactctcaattattgatttatcaaatggaatactcgcattaaatacgatatcgtggtcatcacaatgcacgaatacttctacgccttttccactacctacaacattggtagctttaacttttagaccgaaattatccataaaaaattgttcgcctcgtttggcaattttatctttatgctttttcgcaaattcaaccacatctttttctgcaggtggttggaagccttgacctacatattttgaagcttccatttcttctggcactgattttgtttctttattagattcgttattggtagttgaacatcctgatagcagtaatgttgctattaagattagtttagttcttttaaacatagctcatcacccatttatgtgtttgtaaaacttttatgtttgaaaaagctacttattctcaatgaaaacaagtagcatttaataaattaattagtatacagctagtttttctaattgttctttaacttgaattaagtttgaccgtattagagaggcagattgatccatcgtttgaattgcttgtccttcattttcgttcaagccattacaaacaacttcaaactgttgtgccatttgatcaagacgcgcatgagcttgtgtgtttaaaataaacatatcgtcataatgtgatggcgaatagataattcgtcgttgtatacaaacgtataaaaaccttgtcatatcaacggttttggcatttttaaacctctgtgttttccacgcatgtttgcccttatttaaataatttgcccttttttcgccccgaaaaaaaaacacaaaaaaataaccacactcctaaattaataggtggtgtggttttgttgattgtaggggtataaaaataaccgcattattaaagatacggttactctgttatctgtaaatataatagtagtttaaaaattagtcgttattgttagttctttttttatctgattcttttgtttctcctaattcgcaaacaggactccacataaaaatcaactcctttatataccataatgatactatattttctagtttatttcaatttttcagtttttaaaaatgagtttctgtttttatttatacgcttttctgttttctttttaaattttatctttttgttattccattcattgtaaaattctattaaattaacataaaatttttcatgccctattttatttgttgatgagatatcaatgtaaagactcaatattgtttttaaatagatttgatgcaacgactgataaaccgtattactatctgctatgttattggtaaaatgcatagaaaaatattctaatttattcatgcaatatatatgggtttcattatacttcttaatgagtgtatttataccttgcaatacgtcattacttttaataacaatttctttttcacctgtcgaaaaagtccactgtttatctcctatattttctttaattgttttcttgttgtcaaattctaaaattatagcccgtaaacactcttctttataattctcgttcttgaaagtacgaagcaaaatttttataaattcggtattggtgacttttttataagtgtgatattttgcaatctctttatcagtaaagactgttcttagttcgtgattatcaaaacttaaattcatcttattctctaattcattaattttatcttgcaaaccaacattttctaaaattttcttgtttatctcccctatatcaaaactccttttcgaaattaattttgaaaactcgtctgccatttcaacagccttttctttccttttataccttttgttaaatttatgaaccaccgttgcagcataatacgatatcccaccagataaaatagatgatattatcggtatgtatatatcacctttcatatttccacctcttttaacacaattaagtattatgatacacaacttgcgcaaaaagatgtagacagaacataatggcgaacaaaaacaaccacccagtaactagtatgggtggcgtagcgactataacaactctatgttatcaagatatatgtatcgagtgatggcaaggaagaagtctcctgcgggaccaacagtcagatatatggcctctgccgggctatatagttcactcctactatataaaagtaagtataacataaaaagcaccccgtaaactgttatacgggaatgctaaagtcatatatactacggggagtagtatgaaaactatgctctctatcgtaagaaaaaacacccagtgacatgcttgggtgaacaaggatagatgtaaatagttgatgcatgtgtaacacatcataacaaaaaactagcccgaaggctagctataacataaaaaaataggcaagtaccgaagtacctgccagttacgcacatttaaatcttgagagtaatgttaaaaagtgtataggaatattaacatccatccaaatagttatttaataactgtaagattccctataattaatgtagcaaaatttttattctaagtaaatactaaatcgtgctaaacttaccaaaactacttattctattacctgccttgtctacctctcctgtcgctatataacgacgttgtccactattagcaatataagtaatccatctatagccattgatgcaatatgcgccgtcatatttaattgttgcgttattaggtaatacacctgtaattcttgaattagttgaatagccgtcccttacgttattacctttaacattggcaactgtgtaataaccagtctcttttttatacggtacattgtttttatcaagtgtataacctgctggcactggtggatttttttggtttttagctgatgttttaacattaccagctaccaaaccacctataggcttaccatgaatcgcaccggctattaatttagaatacaagtcatagtttttcttaatccaatccatatcatttttattagtaataaaacctaattcagataaacgatagtttatatttatttctgctgatacattaacgtttagtaaatcattacgaggtgttacacctcttatttgtcctaagttatttttaataacatcttgtatacttttatcaatagtatctgcattgaattgacttgaaataataacatgcccaccacttgcactttctcctgctgcgtctaaatgaatctctagaacaatgtcatacccatgtgatttaacccaatataagccataatctttattatttcctacattaacaccgtaagcagtatcttgatacatatcttgtgattgacttgagccaccatataatgcaacttcgtgacctgcatgtcttaaatacttagcgatatttggtgttatatatttacggataaaatcacgttcatttgttccgtttccgactgctccaggatcgttataaccatgaccggctacaagcataatttttttaggtttaattactgcttgctttttggcagttgcttgcttaataacgcttttagctttatctccaacacttactttatctgggaaatttaatctaataaaatacattgggtcatcgtaataatgaacatgtcttgtaacggtttcgggaccccaaccaggttgcgcaacgccatttgtccaacctttaccattccaattttggccaaacgatgtgaaagtgtttagattagcgctctcaacaatttcaacatgtccagctccgccaccatactttgacgggaaaacgacaatgtccaacttttgcggtaaaaagctatcatagtttttaattatttgcccgtatttttcaatccttgctttattatcaaatggaatattataagcgtataaaccttgtaacctttcgcctgttgctatcataaaaaacatatttgcgtaatcgtaacactgaaatccataaaacaaatcaggattgaactgcttccctaatgaattatcaaaccatttttctgcttggttttttgttatcaacattggtcaacacctaccctaaatcatttgtgtcgttcatattcgtaggtgtcattacttctttaattggcgcttgccctgttgcttttctatacttgttttcagctttatatttctttagcttttgatttgcccatttaccttcttgagatgttggattatctttatatgtagtatataaagcaacaactgttaagataatcgatgaaacactttcttcatctactggtatcggacttatacctttattcgctaaaaactgattgactaatgctaagatcaatacgatgtatcttgttattacttttgcatccatttgtttgctccttttatccaaaataaaaagccagtgccgaagcactgactcttaactattacttacacttactaaaccagaaacacgaccaaaagctatatcctaaaattcccttaagcatggtaatcacctcctttaaatgccaaaaatagtttttaacaaggctataacaaatgtacttagaatcgtccctattaatcctagaatccacatcttgatgtctctaatatttttagcatttttctctttatttttttcatcttcttctttgtcacgccttagttcttcgaaatttctatctaacttgtcataaattttttcttgcgttctcagactgtcttctattctgtcgaatttttcaaacatagtcttatcattttcttctaatcgcgttaaacgccaatcttgttcgtgtcgtttggtaaatccaaacattacaccacccactttattcaaattaaaaagccataagattataacctatgactctagattttctggatacttttctcctgtaataattgcatattcctctttatctataacttccatatctacataccacgctatatcttctttactatattctttcaattgataccatgttttaatatcttcgaatgttggtgaaattaatttaagcattttcagtctctcctttaacctcttctaattttttattaagtgtcacaagttgttttgccattagtgcattttgcttattaacttgcatcgataactttgtactttgaacaacttgtttctgcatactagcaaccatttttcgtaagatgtcatcagaagcgactgtgttttgttcttcactgtcaatctgttgatgcaagtcatctttttcttctgaataatcttcgttaaaaactatttccccatttgaatatttaaaggctttaggtctaaaaacttgagagaaattttctggtaaattttcaatatcaataccttcttcaaagccaccaatgatagcgtatgaaattatctcattacgcttgttaactaatatttgcattattttctcactcctataattttgttaattgtccctctatttgcgttcgcaccagagcctctttgacttcctaagtcgaaatagacatcgtttgatatagttaaagatgtacgactagatttagttaatccaaactcataaacacctccaccatttccatcaccatctggaagatttgagggattcaatgaaatctttcctcctccaaaaggactgccaaactctgtaaagtcaccacctggaaaagtcccataaaaaattaataaaataaattggtctaaactctcatttaagtacaatgtagagcccacaccatttgctgttccatcaaaaataaccgaataccttttattaaacttgtcatctgcgtataatttagcgttactttcggccatattagcttttgattgggcactttgaacagtttcaaaaggtgtattgtaatcattaatagctaattctgaccactcagaccatgaacccgcttcttttcttttaacaaatactttatttgtaccgttcggtcgataagtcatacgcttgtaatctgaagttactactaaatattcgacagtaccgttagtactaacacctcttggataatttatagcttgcgaaacataaataaattgggttgaatcacctattctttgttctggattattaaaatcaaatccagtaatctgcattatcttaccatcatctttagtaatcttagctttttgccaatttgaagtagaaccacttgtgactaaaccaccactattcactgactgcttgaaggcttcatgtttctcatccatatatcgcttttgctcatcgaatgttcttgaatatgcttgcgctttattttccaaatcagatatatggctattagcaagttgctttaattcatctatacttgaagattttgctatttgaatatctgatagacctttttctttagctttttcaatcagactcgcataatcttcaccattttttatagcctcgtccattgctttcgcacgatccataatagttttttctaattcctgaaattcaacaatatagtgtaattttgtttcagatggaatcatgctaaacaaacttttttcaacgttaaatgtgatagttctctcgacaactaccacgtctgaattacctaattctgcaaccgaaacttgagcttgataacttccatctcgtttaattacatcattaggtaattgaaattttaaaatacctttaaatggatctaatatttctagtggagcaactaccatgactcctttacctcgaatcgctattcgtgctttgatattttcttcactcaataataacggttgattatttttagtgatattaaaaagaagaacagaagaatcactctctcctgttctaaaagttatatctagatttgaaatatttccataatgcgctgtgttttctaaatttatagctacagatttctctaaattactcattaacttataattctcccttcgtgtaaagtccatggccctgaacttgttttactatcataatttttcaatagtatctcagcagatgctgtaacactattacgaactagcctatgaacaaagccacctgtgtttgaagcttctacatataagttccaaccagctacccctttacgttcagttggaaaatctgtaaaacgttttgtatcatccgtagttaaataaaacgacatgcctactatgttaatatctgacatttttgtgatgaatgaaggtactctctcccatttaccactatttttaggcacataattccagtccgaaatgtctccagttcttccagaaagcaccctttcaaaagtcatcatattccttgcataactattacgcgtcaatatctgaattacatcaccgccagtttgtggtggcttaacttccaagaaccaacctgcatcacgccattctcttggtaatgggaaatcatcgatttgaactgtatgatcagtgtataaatagtaaagacctggctctgttaacatcccaagattcttaagtttatcaggcctcattggtaaaggtttaactctaccacctgtgtcactcatgataaaaggaacgcctcttgagtgaagtatttctaaaatacctctttgcccaatcatgaaaatacgatgtgttctatttccatcaccaccgacagtaacacctagcatcaaagcttttttaccactatctttgtcatagtatatttgcaaaccttctgcttccgcaaattcgccaggaaatgaatctagtgttccaccatagtcagcattaacctgatacgcttcttctcctgtttctaaatcgaaagccgttaaatagtttctattatttggattactgtctcctgtataccaatacaagtatttttcatcaaaagtcacaccctgcattggttgggtttcgtttgttagtctcatagggatactgattttatgcaaaactttatcaatatttttatcaacatcgtctaaacttcttatctctatataattcattgagttttcaagttcccactgacttctaggtctctcaattctgtatagaattttattttctttttcatttatgacaggggtgatgtagggtttttctgggtgtcctgtaaatacatcttgcataccatacttgccatagctaatttccacattaggcgtatacttgaaacgaactaatgtattctcattattaccatttaagataaaactataaatccataactcatcatcaatatatctataaccgttatgtgtaccatgacccccacctacaatcaatgagctgtctataaattgaccattaggtcttagacgacttagcatatagccattatttctagcttgtgtcatgtatactatgcctgttctattatcaaaccagaaggattgcattactgcatttgtaagaggtgcaagttctgtcacaaataaaaattcttgcttatcaggttcaaaacgatactcgatatcaagaatttcttgtttggtcttatttaattctcttatagtttcctctttattaatttgagttttggtttcccaatcgtctaaatgttcttttaatgtgtcaaaggtttcgccgtttacattaactcgagcttgaacaatctcattagcactgttattacgtggtgccacaacaagtgcgttaatttgactttgtaaagatttgtttactgctgcttgcgatctaccattataataaatttgctcagcgaagtgttgaattgttttagctttctgatgcaacttaaactctgttgtcaagccaagcgcaaattgctctattctttgtaagttttgtatttccttagctctataatctcgacctgctaaagctcccaaatcctttattaaatacaaattttccataatgcaccttcctttctaataaaatagcactgtaccaagtttcccactatcgtcaactgttattttccacaatttaccgtttggggatttctgtacaatgctattttgaataattcctgcttcgcctatttttaaattatctaatttatttttatcatttaccgaaatgataccgtcttgaggcaatccatcaatatcactactgcctgcataaggtatcccatttatagctttccaatgtgtagctggaaagtactgtttatcgttttcaagtagcgctttgattttaacttcttctgttgccattatattaatacactccctatatccattgtctcgaaaggagaattcaaagtactagtgtataaatgatttatacgatttgcttgatagttatatctattatcttgtgcaataactcgtctgttaagcgcttgttgaatttgtaccatatcctttatttcattgctgaaagacacttcatctattgcgtttacaaatggatgtgacctatcaagtttaacaacctttaattcagtgttatatcccattaattcatgaacaaagaatacgctatctcttggctctattttttcataacctatataattaacatctaattcagtcttaggagtatcatttatttgcttttttgcaaattctaacagcttatcctgtgtttcgatatcttcatttgtttgcgtattagcatatcgaatcccaaactgctttgcactatctgcgacgtagtcaacaattgctttgtattgattgcgacctgagttgtcagcaattaaatttaagactgttgatttttcagttccaacatacatacaaggcttagcttttttatttgaagatatatcaattctatttttggggtcttctcctaaaaatatcatttctaaaacgtgcttgcctttatcaatattttttattaaatctattgtttcagactgaaccgacttagcaaaacaagaaatttgcttaatttgcttgccgtctaaaatcaacttatatattccaccttgagagcccttttttattgtaaatctaactgtttcattaccatacttgcaatcaaagttaatagtagctttagacccaattgttgcggtacgataagtaccttcttttataaaaccatttgaatatttaatgtcagttgttctaataggattataatttttcttttcctcggctgtgtactttttcccaaaaacttttatagctgttcttaattccaacgtactgacagtagcagacacagtatcagtattatattgataccttattactttttcgcttctttgatagaatgtttcaggagaataaaaacatatctccgtatcatttggataaataatacaaccaaacaaatctactgcttctttacaatattctaagccatttttattacctaattcatcaattggtatttttcttttaaaatctccaattattttataggtcatcttgactgacgttttttgatttgcaaatccatatcttaagtactcatctaaagagtattctggcgttttaccagtttcgctactgtcgtcatcaagcttatttgattccactgagtgattttgaaattcatacattatgtgatatgccgtaacttcaataaaaactttatcaccttcaacctttggcgctgtctgcttaattgtgtatttttcaccatgataaattatgaagttttcacaaatcaataaatcaaaaacaaaactattatgagtagttctataaactgtaaaggtgatgtacctagcttcattcagttcataatattctttaaaagaaccgtaatctacatctagtaaattttcacaaatcaattcattaaaatccattactgataaatgatcatgataatccattaaatcacctacctataaataaaaggaaacttaaatgtagttttaatatcactgacgtctcctttaatcttaaattcatttttacctggcgctaatgttataatgcctctatttgtatcaattcccactctgtttatatctcgatatgcatacacaccatctaaaacaaaatcagtgtttttatctatacttttgttgtacttaaaaatatcacctgttgtataattaaccagttcaaatcctccactcgcatttaaattaattaatattttcaaatcgtgcttgaatcgtggatttatcgtatcagtagaaccgttccaaatagtaaattgatttgatgtatgagtatatttaggtgtgaaatcaagaggaattccattttcaaacatccaattagagtcgaataagaactcgctatcggtccaattaactgattcagaataccctttataaacatttaaacttacttcaatttcagttgaagaaccatcttttaaattagatgtaacattagctgtattcactgcatatttaacaccaggcatttgagaagtaataacataataaggatgtctgcgattaaacacagatctaaaccaatgctcaaataaatttaaatctataacatctataccatcatagccaaaccttaatactaatgaaaaaggcgcaaaactaattgcgcccggtaaaataccatctactccgttaatagttacactgttatcattggtgtttggactttcagcccttgcatctaaaaatataagctgattaaaatctgttattacttcttccttgtaaccatctatgatttttacaaaagattgcattaattagtcaaacctcccatataattatttgcatttgctctatgcccactttgttttgacaatattttttctaaacctctaattgcatcattagaacctaagttattatcctgagaagaaacagtttgaatcaacgcatctgttaatttatttcctttatcacttaacataacaatttgtttcaacaatttttcaactgtagaagtatcattatttacagtgatgttatttggcttgccatccataccgatgatgcgcataacctgttcagttaattgaattgctcgtttacgtctagttaaagggataaccatctcctgtttatctccttcacccacttcagcaagttgatgctttgtaatcaaaccaccattcgcatatcttcttggaccacttggagaccaaccacctcttgggttaaactgtgagcgccaatatctgttgttaaagaacgctaataactgatcgtaaccactatatatattgttgtgacctctaacagcataatgtctaaatgtttgtgggatatattgaagcaatccttttgctggattgccctgtaaaacgttgatgtctctaagcgaactagattgagttatacctgcatttcctcctgattcgtgttgaatcaagctaatgatatttcctacgtcagccgaagtaacattaacacccattcgttttgctgcacgacgtatatcgcctgcccaagcagatgcagccttattaacacctgaaccacttcgaacgccactacctttaagtgacttcaaccatttttctggatctttagctgtatcattccctggatgcgacccttgcatcaattggaaatgtaagtgtgctcctctaacgaaattacctgtagcacctgatttccctatcagttgaccagctttaatacgttggccttgtcttgctaattgcttagataaatgcatataccagttccattcgttagcaccggtcttaatttgtatagaattaccgccaccgtaatcagtccatactttatcagctataccgcctttaacagcataaatgttcgttcctgtaggcataccaaagtcgataccatagtgacgaccgccattaaagttaagtccacctgtgtaactcccaaacctttgccaaattggatggtcaaatagatagcttccatcgcctccgccaccaaaatcttcaaaccacgattttactttgtctactaatttctttttgagcaatgagtacgcgcctttagcaatttttactgtagcgttagctccgcctccaaaattaatatttaaacctgacattactttatttactagtttccctggatgttgtacataatcccacacatcgccgattttatcgcctaaccaagatgcaccatctttgattttatcgcctgccgcttcaaccatttcttctgcaccttttttgatattatgagctgtgtttttagctttagaaccgaagtcccctgcttttttaccaagattttcagtaacttgttccatccattttttctttttcgtaccaccatggaattttggcaaaacacccatccgctgtaacttcagagtgtcattggcatttattacactatctccaactcctagtggaacaaccacatctcgtccttggggtgcatggaatgttccgtcagccctgtgaattatttcttgaactccaccacctggggcgtttccagaacctctatcatttaatacagcaaatgtcggttgcgttaatgctcctgaattatcggtagctacaccctttcctgctaaagtaccagtagacaatgtaggtattggcttgatgagatttttatcagtaatggctttagatattttattaataccgccaatcatgctattcaaaccgccaatagctttattagcaacatttttacctaaatcagccgcagctcttcccatgtctttaccaatatctctaatccaatcatatgtttttgatagccattttctaaaaccattaaatactgatttagcgttagaccatgccgaacttgaaattgcatcaaaacgatcgtgggctcttgaatacatatccccagtccaaccttttaaagatttgtatgagttactaaaccatttcgatgttcctttccaaacggattttgcattcgaccatgctgtactagaaatattatcccatttcgagcgcgatttattagccatatctattagccaaccctttgcacttttatatgcgttgctaaaccattttgatgtgcctctccaaatagattttgaatgcgcccaagctttatctgaggcatctgaatacttttgcttagtttgattgtaaatacttcctgtagtcgatttaacagattgccaagcttttccaaaccatttaccagtactattagctatagccttagtgtgatatcctacagaacttttggctgagctccaacttgaacttaatttgcttggaattcctttgattccactccacatttttttcatttcgccgccaaaatgattagcatttctgcccattttactaaaggcttcaccagttttagtttttacgccgtcccaagcatttccaaaccatttctttatattttctctgtttctacgagctgtttcttcttgttctttagcgtatttatcacttttcttcttttggtcttctctaaagttagaccaccaacttttaagaccattccaccacttttcagtatttttatatacacgtccactggataaatccatttctttatcaatatctttattttgctttttaacaacgtctactacagcatcttttttagattttgcctttcttacttcatccttatgtctttgatcagcaatagctaacaatttatctttttcagacttagaaaggttgacgttattttttatagcaatgacatcatcttcatactgcttatccacttctttttttcttgcttttcttgctttttctgcttctttaattgctttgctcgcttcgtctattgaataagcatttctgtttctttgcattcttactaaaatacgctcttgctctttttcagtcttactcaattctttaacagtgatgtcacgtctttgattttcaagcttttcaatttcttttctttcattttctgaaatctgaccatcacttaaagctttttctttcaattctttgattttctgattgagttcttgctcttttttaattcgcaagtcatttttttctttagttctagttaaaatgttttgcttttcttgttcatcgaatgcactatacttatcaataagttcttgagttttttcgagttcctttttatttcttttttctatttcagctataaggttattagataaatccgcttcaattttcaaaagtttttttgctttgtcttctgttatttgacccgagtttaaacgtactttttccatgattctgttgttctcttcagaatagtgtacgtatttttctaaagctttttctgtttcttttgaaacacctttccccaacacttttacagtatcagatgcttttttagaagctgtgcccatggtttgcataaatcctttaaacttgttgactcctactttcagaaggtcatcgtcactcaaagatttataaccatctttcatatcctttgaaaacttttctttgaagcttttgcctatacttccaagataatttttaaactctcctagcttcctaacagcaccgccaataattttgccaccaaaaaactttatagtttctcctaaaccgttaataccgtttctgaaccattccacacgatcatatgcggttttaaaaactttatatgcaattgtaatagcagttattgtagcacctataggtcctgttaaaaactttaaggctacaccagcaaatcttgcgcctccacttactgcaaataaggattttgcggctaatcctaaaccgtttttcaaaagtttgaacggtaaaattgctagctttgcagaatttttcaaaacatttataggttttaaattaaacaacatagctccggctaatcctttaaagccttttgacgtttttcctgttgtagaaccaagaaataatgtttgaagacctaaagatttcattgcttttgaattggtattagaaagaattgtattttcagcaatgcgtctatttaatgatgcatagcctttagccgcgctcccaactgcacgtattaataagccaccagcaagaacagcaggaccaatagatgcaccaaaaattgctaagcctaccgaagcctttctaacccaaccaggaagatgtgtaaatccatcaactaattttgttaatccttccgcacctgctctaatcataggcgttaaatctttaccaacttcaattgctaacgattcaaaagcgccacctaattgttccagagcacctttgaggttatctttcatcaaatcagctgcttttttactttcaccattagagttcttcaatgatttgctatagctattaattttatctggacccgcttcaatcaaggctaaaaatccacttgctgcttcagtgccaactattgtagccactgttgctaatttttgttctctcgtcatgcctttcatgttatcttggaactgtctaatcaattcgcccattccaacaaactcacctttagcatcagacaaatgaatacctaattttttcatttccttagctgtacttttacttggattagctagcctaataaacgaagctcttaatgcagtacctgcttgagacccctctaaacctgagttagataaaacttcaattgctgcagaagtgtcctctattgaaactcctaatgcttttgctggagtacctgcatattttaatgcatctcccatatattgaatatctgcagcactatcatttgctgatctcgcaagtaaatcagcaacatgatttgcatcagatgcttttaaaccgaaagagttaatcgctgaagccattacagttgcagttgtagccatttctgcaccacttgcttctgctgcgctgataacacctggcatagcctccattgtttgtttggcattaaagcctaaagctgccaattcttccatacctttagcaacttcgttagcacttttacttgttttagctcctaagtcaaccgcttgattagacatgctttttaagtctttactgcttgcttgtgcaatcgctccaactcgagacatttgcccttcaaagtctgcactcgtttttaatgctgcacctaaacctaaagtaatcggtgtagatacgcccatcgtcattgtacgtcccagggaagtcattttgtctccaatagaactaaatttctttgacatgacatccgcttgacttgcaagtttaccgaaatgactttgagctatcatttgttctttgttaaaagtcttcatttcggatgaagctttatctattgaacgctccaaattatttaaagcagctttttctttattaacagctgtttcagcttttgcgacattagcgctatgattcttaatagtattgtttaaatcattaaattctttttctgtttgctttaatttagtattagttttagcgtaagaactttcaattttatcatttgattttgaaagattgtcattttgcacttttagtttttgaacttgattgccttcttgtttatattgttcaacaagtgctttatgcttagcggactgcttctgtactgcgtcacttgctctttttagttgtgcagtagtagcttggttactattcttaagcttttgttctgcatctctcaactgtttaagtttttgatacgcatcttgtttacgttgatttgtacgtttatattgattttcagcttttttaagttctgtattcgatgattttaaggcttctttagatttatcaagagctaatttttcttttttattggcttctactaactttaaatatgctttctcaacatcttttacactggatttagctttttggtaattagcgttaacttgtttaagctcatcttctacttgagaatacatctttttttgaactttaagcctatcatttaaccccttaattctcgcctgatatttttccattgatttttcagacttatcaaatgctgacagattagctttcatttcactattaacaacacctaattgtcgctttaaacctttcatgccttcttggacacctaaatggtctaatttcagctccaaggtcatgccttctactttttcattcatattaacctcctttctagcttccaaaaagttttcttaaatccgtacctgtaatgactttttgttcactttgtttttcttcagtctcttctttattctcttcattaagtatttctaaaagttttacatacggctgttttctgacttcagttaatgtccacccatactgctccatacagaaacgttgtattttcttaatgttcgataaaatgtcttttattgagattgttcttctgtctttcccatctcttctggttcagtttctgaatcttcttcatcttcaccattgatttctcgaaatatatcttgtaaggcttttgtataagttttagtactcatcttgttcagaacatcttcttcagtcaatccttcatctttaaataaatctactaataactgtcgctctttttgtctcatttttgttgcgttaggtgcttcttttttattctcttgatttactaattctaaatactcatagcatttttctgcttcgcccattgttacatcttcttttgtatagctctctgtttttcctgttttacgatctttaatttcaaatttaatcattgtattagctccttttattcaaataaaaaagacgcagatatactgcgccttaaatccctatccgtttgttactgtcactgaaatttgtcctgacttatcgcttccatcagtagacgtagcagtgattactgaagtaccttcagctacaccgtgaattgctcctgtattttcatctacagtaacaaattctggatgttcacttgtatatttcaatattttattcgttgctgtgcttggtgcaatgtttggctcaacattgtcatcggtatttaccataattgatttagtttctggtgtaaatgatacgcctgagactagaattggattggttttgaattgaggtacatcaactttactagattctttaccattttcttcccatgccacttggtaagtaccttttggataagttgtatccgcttctaaattagataaagttactgacactttgccttcaccttgttcagaagctacgacgtcgtctcctttataaacctttaaagttttagtcataaattattctcctttgatttattttgaaagcccctattctgctgaaactgttgcagattttgaattaactgctacttcaacattttggggattagctgggtaacgaacctgcagaatcctctgaatgatcttcactgtccgtgtatccaacgaatacttttttgaagaattctgcttctccttctttaccttcatgataaccgtatacaataccttgtgacgttccatcaacatcaacttttctattcatccagtcacctgttaattttgtaggttctggggcttctgctttttcacctcgtgttttaaattcaattgaatctaaactaaaagtacctttaagtaaggctacatataccggctgacctgttaaaccatcttccgattcgccaattactgttacatacggtgctcttgtattctctcctacccaagatgtaccatttttatctttagtacgtccaataactgtgtttaaatcatcacttggaatattgaaaatactcatgtcagacttaacttcattagtaccttgttttttcatccatacacgtttgttagatgcaaacatatctactaaatctggtgctaaacctgtgatatttaggtcaactgtaccacctttttcatcttcccatgtcatgcgtttaactacttttgttgcttctgggttaaaaactccaacgtataatcttttaaaacctactttataagaaccttgtccttctgccattgcttatttcctccttaaaaattaaaaagcacacctattcgatgcgctgatttttataatatatatttttgggtatgccttgatatcgtctcgacatcacataacgtttagtttcttcaaaataagcatctaactgactagatgcttgaattaaattttgttgatataacaggtatcttattcgttttgttatatcaattgttttctgattatttgaagattctacatctatttgaattaagtattcttcactgagatatttatcagacataaagtctgaaggcaaatcataaacaggtgtaataacaacaaagggtttggaagtttcagcgttttcagtgactttgtaatagtatattctagaatttatatgtgttttgagctctgcatcagataataaaattccttttatggtgtttaatatattcatttatctggccaactccttttttataatttctctatacttacgttcgctagcagctaatgtttttgcaataactccaaaacctcttggtgtatatttttttccatctcttgtataaccatgttcattcaagtgaataatgtttttgcgattcataggacctacccattcaattaaaacagccctttcttgactaccaacttttgtataaggcttagatttagtcatttcttctatactggcacccgtatctttaaagctctcgaactctttctttaaagcctttataaaaaattcagatgcttcatttaaagctttatcactcttagcctgcattgcttgtttaccgtataccgattctaatttattcaacacttcaggtatccctttaatttctacactcatttttctgataaaaccactgtattatagccaatatctggtgtatcaattcttatttctacaatgttgaataatttatcggaatataatgcactgtcaattttaactaagtgatttgtttgtggtagatattcagttttagaagacctgacaattatggttaatcctgattttgattcagtcgcttttaaaatttctctatctttcatagaaggattataaattttacaaaagcaactatacaatttcattttttcctcttcatctggatatggtcctttgtttatatattgaaaaaaatacgcgcgatctttaaattcattaaattccatttaaaaatcacctaccacttttttaatttcaaaatcattttttgcaatcctttttcattaaacaccttgcttctagattggtcatttgagtatccacgactttcataatctcttgcaatgatatatttaatcgctgtacaaaaaagcgggtattccaagtcatctttgtcataatctggaaccccacttaatagtaattcagacttagccgattgaatgagaccttcaattaaatcattttcgaaattatagtcaattctcaaccacaatttaatttcttctaaactcatttcatcacccctattcggctgatattacagctgatttagccttagctgttacattaaccttttggggcttagctgggtaatggacctgtattttcttttgcttttgcaattctgaatgcactgtctaatgtacgttgctgatcataccatgctgttaatacaaacaaatattcgccttttttaacatctttatcagtgtcataagttgttccatcatagttaattccaaaataattgaaatctcccacaataggtttaactgctgcatctgtaaatactactggtttgccaaatactttttctgctggtgtgtcaaagaaatttgttgttccatttgaaagaacactaataattttgacataatctgcatatcgcatataaattgttgcgttatcacgataatcttcatgtaaatctgctaaagcgttaataatagcatcatacatgtctgctccctcaacttctttaacagatccattataaaatgacatgtgttctaatccagatttaggacttactgctaaggcatctttacgctctttagctgctaatcctgattgtagtgcgttttcaacccagtttactaaatctacatctgatccatgaattacagtatctgaaattgcagcaaatactttgaatttattagtagtgaacttgactgtatcaccttttgcttttaattcttttgctgtttctacgtctgtaatgaaatcatcatcgtctaaagtgtatgaaactcttggaatctctaaacctttaatgttagttagacgagctttttcacgtaattggtttttagcaaatggttctgaaacaatttctttagaaagtgtttttggtaagagcttatctccacctgaatcatttcctgttggtaaagcgtgtaataaacgttgtgcctccattgaaggtttttcaaattcatttggtaaaatcgcgtgacgataaaactctgccttagctttaaccatcttctcattatcacttaaagattgataagcttctcctttatctttaactttcgctttttctttttcttcaatgtcttgcacttgtctttcaacaatgttaaatctttgttgtaaacctgctttttctgtttctagttgtttgatgtcttccatatcaatatttggatctgttgctttctgactcaattcatcatttttattttttaattgttgtccaatcatacctaaggattgttttaattcatataatgtcggcatttcatttcctcctaataattcattgtcatttttaaaatttcgcattcgcgtttaattttttctcttttttctttttcttctagtgacatactttctttaggtgtttcaaccaattcagatgtatctacatcatcaattttagtgattttgtctacatctttctttaaatcttctgggacgttctcgaaacgcttatattgctctttagagatactagcagctatttcattagctcctaaaatttcatctatcaagccgaaagacaaggcttcttctgcagtaagccaagtttctgcatctaacatctgttttaagtgttcttgatctaaatcttttgctttatctaaataagctgaattactaacagcatctgttttttcaagtaaatccgctgtctttcttaattcttctgcattacctacagtcataacccatgaattatgaatcattaaaaaactatttttgtgcataaaaatagtgtcaccactcatagcgataacactagcaattgatgccgctaaggcatcgacatagatattaatttttgcaggatgcatttttagcatattgtatattgcatgtccttcaaatacactgcctccagatgaatttatatgaacatctatttcactgatgtctcctagttcatctagtttatttttgaaatctgtagcagttacatcactttcaaaccatttatcacttacaatatcaccataaatgaatatttcacctttactttttgattttcttttcatttgaaaatacttagctttcattgacatttttatcaccacctttcaaagattttcttaattcaagtggcgtgtcaattgggtataaatcaccgcttattagcggcttatctccaccttcaactggtggtaaatcttcccactctctaatgtcatttatagtgtagtaaccactacgaactgctttaaagtacacttctgcttgtgttgcactatcagcccttaaataagatttaacgttaaatttaaaatacctatttttttctctgtctgttttagtaagtagtttccgattaaattcttcttcatactgtttgacgattggcaataaggtatgctgcaagtaaaatctgtttaactcttcatttttcgcgaaatttgtatttgatcttgcatttaagaatattgagggcaattgaaaaacgttagctactctttctcttgttaaattctcgcttgccactatatcttcagagacatattttttaggtaaaggttcgatttcaacaccaggctcttggaataatattccaccgttttcttcatagtactgtttgaaatcttctaacacttgttgccttttttctgtacttacattggaaccatatttaagcataaaagaatctggtttttgcatttctgtaagattaaaggttcttactgcattgtcaaaatcagttgtattcttcaacacatcaatcggactaataccttgaaccatattagatgccacgatgtgtttaaaatgcaacatgtccatattatgaacaatcaatttatttccagttgcagcatgaatggaataataaagttcacgtgattggttttcaattaacatttcaacaacatctggatttaataagaaaagctttgatggttgatgatagatgtctcgttcaattagcacatatgcattacctttttcatttctgattgtttcaatttgattaataaaatcaaaactgctcagagaattattcggtgacactgtaagtaaatcagatacttctgtattaactactttataatcttcatacattttcaagggcaaactagccatcgaattagataactttgtaatagctgaaaatatcgtttcattagtttcaagcgtattattgattacaccccaaaaagatttatttttccatgggctaaagtcataaagcttagaagctgactgatcaatccaattgtctatcaattttttctttatgcgtgtgacaatattctcttttgcgataacattcacctccttaacgcattatatctttaatactaataaattctatgtttccttcacccttgtcagaaacaactttattcataatatctgtatatgtgtttaaaaatgctgcaaaaccatctattttacgatatctgctttgtttagatggcagccagttcccatttctgtctagtttcagctgaacattattgatataccatttcattaaaggattattattaaatattattttcccatctaaaaacatttcttttagatccttcaatgcagggctcaaggtcaaagccccttgtcttgtttcttctgtttcaaagccataattctttaactcttgatttaatttaaaagcattcgccctatcataagtgattttttcgacaacataatgctcattcatctttattatccaatttaaaacatcttggtagtctatataaggattatcttgtattgttagtaatccgtcttcttcccattctatatagggtatcttttcgttagaatattcaactttatgcttaggaatccaagaatgtgttaagacagcaactttgccattatctaatgcaaaagtggcacatgcggctgtaaagtcctctgtttctgataaatcataacctatagtacatggtctaccttccaactcatctaaggaaataatgtcattatttttttgaagtgttggataatcaataaaactcatctcatcattattagcaaagatgttaaaccttttggttataaaatctccacgttcatctggtgttctcttagccttttcccactcttctttcatttcagctaaatcgatagaaacacctaggttaggatttgctttaatccaattcgacgaatcatttatatcatcgtcatcatcgagagaagctaaatagtaaaaagttctttcatcttcgatgattcgatctaaggtgtctcttcccgcttctaccatattaacaagtggtccatctagttggtaccctgctgtcgtaatgtagataagaaggggttgtaaccttgccgctcttgagttttttataactgaaatcaatttataatctttaaattcatgaatttcatcaaaaatgcccatatgtgtatttaaaccatccaacttatcactgtctgaagcctgtggcataattttagatatagttgcatcgtaatgaatttcatctctcaaaggtctaaaattttctctaagctttgggctagctttaatcatcgccttagattcatcaaatagaatcctagcttgtttcattacgtttgctaaaagatggatttcagcgccgttttctccatcttgagaaacagcatagttagcaacaccagatatagtagttgttttaccattttttcgccccataaatatcaaagcttctttaaacctgcgcagttttgtttctttatgaacccaaccaaacaaactgccaataataaaatgttgccatggttgtaatacaagttgacgtttagatcctttggaaggtttacaaaacttttctatgaatcgaataggacggtgcgctaattcttcatcaaatacccatttacctccattttctagatatctaaggtgtctctcacattcttttttaacatatttgcttgtttttattttcccttgagtgacttgctctgcataccatgttgttaatagttttggtgaaggttcatttaaaactttaatagtcaccgaatccaccttcttcttgaactatcttttttctttgtgctgcagttaaacccatagacttgagtaagttatttagtgtttgaactgtttttgtcagttctatgcttaatggattcttaacaatattgctcgcaccagccttgtttgtatgctctatcatcaaatcactatttttaagttcatctcttaaccgacaataaaattcatacgtttctatatacaaattaattaatatgtcatcagattttttataatcctctatatattctttcagctgtttttttgttaatttcatataaagaccccctttcataaaagtttatccgcgttgcaagcgaagggcccccgccggtacccgtcgaaaaaacattttaagccgatgggtagggggctataaaaataaattatttttttatttaaatttttaatactctaattttcttaagattacttttgtcattatcatttgcatgaattttgttatgacagctataacaaactgacatcaaattatctaagtctaaagctttattaaaatcttcatcaacataaataatatgatgcactatgtttgcatctgttactatgtcttcacgtaaacacatttgacaaagatgattatccctatctaatgctatctctcttaacttcttccatgcttttgaatgatagaaccaatcgtattgatatgacttacgaccatgcttataaatgttattatgcttggtcatctcttacacctctttgattgcataacaaaagacacaccgcatagcgatgtgcctcgtgtacttgtgtcgtataacttttagataactttatacatctttccgatactatcatattactacagatttgtaggccttttgcacaatctttgcacaatgttatttgatacctgcatgatacgctaccgctttaacaaagttctttcgtatagtagtaactgtattacgatgcatgtgacatgcatctcctatttgctctatctttagcttcttatctctattccaatactttagcctaattactttcttatgatcttcaggtaactttaagtattcactttcaactgcttcgaccatttcttctaggtttcgtaacatcttattagtcaataaccttgttgccattagttcagttgttctaactggttcacctttttgcaacggtccatacacaatgttagtgtctagctctttcgttgggttaagtatctccattctcaatctatttatctctttcttgttctcttgtaggttatatatctctgactcaatatatttaaatgtacctggcttaatatcgtatgatgcctttcccatcttatacctccattacttatgcttagctattcttgctttaatagctttcatcaattcttcttgcgttagttctttattttgtaaagctttatatactctttgatctattgtgttatcggtcataatgtgatgaataatagtcgtatgattttgtccttgtctatataatcttgcatttgcttgttggtataattccaatgaccatgtaagtccaaaccaaacaataatgtgcccaccttgttgtaagtttaatccatgccctgcacttgctggatgtgctataagcagcttaatgtctccactattccaacgttctttatagtttgaatcctctaatgtggttgcttccttaaacctttgaagtattctttctttatcatgtttgaagttataaaacaataatattggttggccttgagactcctctataatttcctctaacttatctaacttcttatcatgtataagtcttacatcttcatcatctgtataaactgcaccgttagatagttgaagtagtttttgacttaatgatgccccattctgagctacaactgttccttcttcttccgattctaaaatatagtttttttctaattctgcatatacttttctttctttttcagataagactactgtttgtttagtatcaactctgtcaggcatatctagataatctttcgctttcatgcttaaacatatatcttctattcgttcatatatcttttcttcagatccgtctcttagctcccagttaaaaacatgttcgctaacttgatgtgttggtttaaagtacctttctcgataacgactgaatgaagactcaagtctttcgcctctgtctatcaaataaacttgagcccataaatcctgtaaactatttgggctaggtgttcctgttaatcctataaatctattaatgagtggtaatttctttttaatagatttaaacctttgactcttaggacttttaaatgtagacagttcatcaattacaaccatatcaaatggccattcttttttatattgatcgcataaccatttagtattttctttattggttacatagatatcagcctctgtgtttaatgcatcatttctttctttaggtgttcctaagactaaagacactttcagatgatttaaatggttccacttatcaacttcatcaacccatgtatctttagcaacttgtttaggtgctatgactaacatttttttagtgtctaacaactgcaattcactaaatgctgtaagtgttgatactgttttccctagccccatatctaaaaacaaaccgtatttctcattatcaataactttatctattgcatacttttgatagctatgtggtttgaagtcaatcgccaaatgttccacctaccattctgataaaagtatttacttgttctttattccataacacatatactttatgatctctattttcaaattgtctatgcacatatttttgtaaaggatgcaactttcctttttcttgcttcatttctacaaaatatgtttttccttctggcataataataattctatctggcacacctcttgttccaggtgcgacccattttaaacataaaccgtttagctttgttatctctttcactaaatatttttctaatgtcgattctttcatttattcaccttgtatacaaaatttatatttgtgttccgatgttgtatcaattcttgccaaacttttaaaaatagctgttagagggttacccctatacccctttactccctaacactactttttaaactttatagtgaatttgatgcaacattggaaacaaacagggttgaaccctacagctagaaaggaaagaggtgttgtatcatttgttgcatcaatgttgcatcaccaaaaatgatacaacacctacgattactttttacactcccgtgttgcatcactcaaaaaatgatgcaacatctgatacaacactctaaaatgcatatttattcaatatttcttatattaaatcctctaaactttcatctcttacataagctatctgtacaccataatcttttccaaatcgaattttcccacttttattaccatcatatacagaccaattgtctaattgtcttaagatgtttgaaatctttctaatttccatagatcctctactatctcccttatctttaccaaaacattcaacaaacacttcaagcgcacagactttatttcttttaacgtaatctacatttgcctgttggtaacatatcaacatcaccttgataaaatcgtcttcgttcaaagatagttaagtcatcccaattgctaggaattggtgtgttaagatattcatcaataatgcctgtatatggagattcctcagtatgtttgctttgtattgaacgcatttcttcttctagttcagggttaaggaataaatcttctccttgttcataatagtgtttagccttctgcccaaatttggtcaatctcatctttggttagtttagaccagttcacttcaactctctctggatttacagtcattggccaaaaacgtcttccaccagtttcatctcttaagaaatcaactttattagttgtaccaatgaaaatacattgccttggaaaatcttcaatataatgcccataagcaacacgaaatcggtcaacttgtttagatatgaaatgcttaatagcttcaacttcagcttttcttgtagctgcaagttctgccatttccattagccaaacgccttgtaaggcctcataagcttctttacctgtaacagaaactaaactgtcagaaaaccatgcaccacctaatttttttagcaaagcagatttacctacaccttgaggaccataaagtgtaagcatatagtcaaatttacatccaggctccattactctagcgattccagcagtcaatgcttttttggtagttgttctattcacttcagtgtcttcaacacctaagtatttgataaataacttttcaaggcgtttatgtccatcccacgatattttatttagataatcccttactggatgataagcattttgcattgctacgcttataatggcatcttttgttttacctgaatggtgtatgtcataaatcttttcgatataacttcttaaactgctatcatcaccgtcttgccattgacgtgtcttaaaattagtattccatggcactttccctaaacattcaatttgtttcgtaaattcgttaaaggctatttttccttttaaatttggatcattacgcaatataatttctatatttgggatactagctttgaaagtacctttcgaagtaatttctaacgtctcagaccatgcatcatcgctattttctatttcatcgaaatcctgcattgcatcagacattttgtcattaattaattgctttttaacaacctcatcattttgcgctctttgctgcattgctttataactaggtagtcgattaaccggagtatctgttttagtttcttcatcttgagcaccatataagtgtatgcgtactaaatcaaaactgttcacaagcataccgcttacgggatccgtattatgatgagaataggcaaacttgttattttcgtataacaccaatccacctgcagttgaaccttcatgataggtataacggttagtagaatgtttttcgtataaatcaggaataaaagtttctatagcttcttctatcgtataggctctacaaaatgcaccaacaattcccggcttttcttctgggtcgccttgcttatctgctaatcttttagtcttactctcttcccttgaagacgttggccattctaatgtgtcagtccaatcaacatattcatttaatattttatctgggtctaacaaaggtaaatcttcataggtaaagaaaaattccgcatcgttactagttgaaggccaatacattaacctatgtggttgataagttgtatcatcgaagtaatccatgccaacgatatctgcgactttacgcccaatagcttcatactcatctgcatttacatttcgttttaaaggaatcactaaacgcagtcttggacttatctctctatgcttatgtgttgaatataaacaatatgcaaaatcataaaacatagataatatgtcagtcatatcttgggctgcataatcgatatcaagtgttagcattgaacgattcatgacttgaccagcacgccgtttgccttcttttaaatatccaccgacaaatccgccaacatcttttatatcggcttgttcagacttagacattttattgtactcagttaaatcttctttagttctaactgtttgtgctagcttctgcataaagtcagaccaagccatattgtgattagtccaatgtgtagataaacgactagcagcataagaatatgagacatcacgatcatatttaattgtttctatttgagtgactttgtctaacatgttcggctcctttcattattttagatagagcagagaagccaacgcctctctttagcttttgaatctttttctaattcgttcaacttcattttcataatcttctaaaccttcaacaccattattttttactaactgcttgaaaagataagcattcatatactccaatgcttctatggttttcatcttatgagaaatgctacttaacaagatcaataaaaatatagataaaacaattgaaatgacaatccacatatttacaacacctccagtgctattgctacacacattaatataattaattcaaaaatgataatagctattaccatgaaacttcagctctgattttttcaaagtcacttggcgcctctacatcatcattagccgtcatcataatatatacttgctcagttacatacttacctagctcatacatcgctagtaagaataatagtctcaaaatttctttaaccaccactaaacaccccatgttaatttatcgataatttgtatagcttgttttaatgcgtctcttttttcttcgatatctctattatcgccatcttcatcagctgacattaactcactgtcatattcatataatagttctgatatttcattactagctactactaataagttttcatctacatcaatcgttaccgttttctttggcatctccatctctccttatcttaacttgtgcctcgtatttgcgctcagcttcttctttactctctgcctcaataactgtaaacgtctgattatctctagccacagtaatatgttcatgtggtcgtcctgttgaatctttgaatgttgtgactaagtattgcgtcacttccccaaaacctccttaactcgatctaagatgtctttacactccgctacttccgaagccttttgctccacgttctgaaacactttcgaattcctccacttgctttagttccggtgtccatataggcacgataaccaattgagctagtttatcgcctttgttgatttggtaaactcttcttatgcctcttccatcttgtacatagttaccttttatatctaaaatgcttattaatccatcttctaattcagcgtctatatcatcatataaaaagggtattccatcacgttcttcatcattcttgatattaatccctaaattgccatgatatcccgcgtctatcttgcctgtttcaatcactaaatacgttttactacttacaccactacgactagttaatagtccgacatagccctctggtatactcacagctacatctgttttgatcactgctttttcttgtggttcgagtacgacagtttcagctgagaatatgtcataacctgcatccgtcttatgatttcgttcgggcattctagcattttttgataatagttttacttgtaatgtgttagtcattttcctattcctcctcatatttatagacaacttgacctgccataatccctactgcttcatcaagttcaataccttctttaactgaatgttgaatagcatttgtcattccctcaagtatttcatcaaacgcttgcgctttcttatacacgtcctcaatctcttttagcaacccctctgtgtcattaccgttatacgcactagcactaataacggactgttcgattttttcgcgattattcatttgtgtcatcctccataaaaattttattgtttaattccattccgaatttaactctttcatcatcgttaccgaattcgtttattaaatctttttcaacgctcttgcaatacctatcccatgcgcttgctttcttctccagttctttgttacaatctcgtaacttcgctatatccccaataagctcatctcgttgcttcttgtactcttcacgatcttttaatgctttgtgaagtttatctaataacttgttagagttagtacaaagatttttatattgttcatctgataaggtgaacgtcatctcataacctccaatagcatctcattttcaaaaatatttccaacaatttcaataatatcgtcattttcacttagtaattcagttacattgctaaaagttatataaaaggctccttctttaaactcgataaaacttacttctctcgaataacaatcttgaacaatatccccttcataaatctccacaccgtgcacatctttaaatcctgtgtattgtaatagttttacttcattgaaacttttataacctgttgaaatcaaaatgtacccactattaaaatcgatttcgtcaataatactcataacttttttatctttatcccaagctttaaatttcaacatcatactagcaactccccatctttccagattaacgtcatagttaggtcatcgtttaagatgtagaatgctttggtaggcacacatctgccatataaacattcttttatactagtgttctcatatagtgtagagttatagtctccttcttgaatctcgaataattcaatcaacctatcaaccttagtctcttccgttacttctttttcaatatcaactatgaaggggatatcaattggaataaaacttgacgtcgaacacttatttgtatttggatgaaaacgaacgaatccatcactaaatcctgttgaaaaaaatatttttccttgtgatagatccggattttctcgcgcccatttaattaattcatctaatctcatttcttttttaactttgattttcattgttatatctcctcttgaacagtaaatttatcgttaattgatacgtatccagtcacattacataagatgctatcaacatcaaaagtcacacaacagttgcgttcaacatcatttgaatagaatcttttattacctgataacttggggttatcccaagcccattggataagttcaggtaaattcatttctttttcaattttgattttcattgtttccgcccttttaaaataaagttagttgcttctgttcctcatattccaaatcactttgctttatatatgtttcaagctcttccgctgtatcaaatgtctttttcacaccttgccaacctggcacgatatgaccgtgaaagtaataagtgccatttactacatggatatgtgccactcgttcgttatcctgatacagatatctcttagatccaaagaattgatttaggtattctttacgcgcgctatctgtcatggtcatcactccttttaacaattaggcagaccaaacgacatgcattcgtcgtatagctcttcattacttatgcttgccttatagttttcaatcacattgctaacttctttatgactcattgctttaacttgttcgtctgtatatttttcgcagtcttctaattccagttgctcctgtaatgacatcacatattcaacttgtctttgggttgccatcgttaaccctcccacaagtcaaaagctctttggacgtaaaacttcgcctttgctaaatcctcatgaccattctttaacggtgctctagacatgtatttgattgcattacctattgcgaatgctagttgaggtggatactgtgccgtaacctgttcgataaaatctataatttcaatgtcgccgtatgtgtagtgcgctggttgcttaacattgtcttgcgcttcgttcatatctacttttctgttactgattacgctcattatgcttcactccatttcttgaacatttggttataagtgacatcgaaccagtacggatcacgtgaatgtttttgtggcgttccatcataaagccatggtcttaatcttctctttctttcctgttcatattccgctctcacatttcgttggtatcggttcaaaatcgctttttttctgattttttctctccctttttcttcatcttttatttgactcttcatatattcaacttcttctttagattttgagtcctttcttccacacaataattcatcgccgcgcattttatgtttgtatctatatctaagaagttctggagatatatgatatttttctgaaacttctctcaatgtcattagttttcctttaatacgcactcttataacttttcttctagccatcattccacctctaaatctaaaaccttgatatttataacgttatattttaatagttcacctggattattaaataaatagtccgccaaattttctttttctttatcaatctgattgtaattaacactttcgacttctgtaggaattctaatgtcaacagaagcattgatataagcttgatgttgcatgcaatcacactcctaatccttcatataaaacggagaagtaaacccgtcactattcaaattcaatccttttgcccaatcaacaggcttattcatgatagtttcgatttccttaagtccatttgaacctctaggtatttctacaattacttcatcatggacatggccaactattttaaaacctaatgcttcaagccttgctatagaaatcgcaagtaaatcccttgcagttgcttgaacaatattctcgactaacttcccaccatacgtttttaactttgaccatttacggttaagatctaaccccataaattcaacaacttgactaccccaactattttcaccaactaaagcttttggataagctaaagctcttccactaggcagttcaatcattagaaaaccttttttcatataaaatctaagtccatgtgtatgatgcgtctttcgggattttacagtattaattgcagcctcttggcaagccttccaaaaattaactatgttaggatttgcgttacgccaactatcaactaaaccttgtaactcgttttcttcaatgcccatttccaatgcacccattgcttttaaagctccagcgccaccttgatagcctaaagctaattcggacacttttcctttttgtctgagagggtcgcctttagttatgctttctaccggtacattaaacatttgagaagccgatgcttcatatatctttccgtgtgtgttgaatacatctaaacgccattgttcttttgcataccatgctatgactcttgcctctattgcagaaaaatcacttactgctagttcattaccttcttcagcagtaaatgtcgtcctaactaattgacttaataagtcttgaggatgaacattgagtaataaatctaaatcatcaaaacgttgttctttaataagatctcttgctatttctaattcagtatctgaaatataatgctttgttaaattctgaagttgtacacctctacctgcccatcttccagtaccggcaccgtaaaattgaaacagacctcttacccgttcatcactgcacatcatgtcatgcattttgttgtattttttcacactggttttagacatttgcaatctaatttctagcatttttttagcttttcctgttgcttcttttaagtactcctgaaccgttttcttttgtaaattaggtatatctaatccttgttcatcctttaaccaagccaataactgtgtaggactattaggattttctaaacctgttatatgtttagcttgtttaagcaattcttctttactctgcttatcgagcacattagctcctaacatcaatgatttagaaagcttaatacctctgtcgtttatatgttggtcaaaaacccaatatgtttgttcaattgcagttactggaaagtctttaattttattagcaatcgccatttctacttctacatctcgaatacagtaatctataaattgttgccatttttcaagatcatgttcaggtaggtttcttgttcttcctccattaacttttgttggtttacaaggtatagagaaataacgaattaaatttttacctgctttatctttttggctttgtagtcttaaaacttctccaactttatcaagcgaagcaggtaagccaatacgcattgaattaaccattgtgcaaatccattcttcaggtggcatctgtttattaaaatgtttagcaagacaagttctttcgaaattagcattgaatgcatacttttttacagcagggtcaaatagagcaattttaaacgtctcataatcagcgtggaaaggctcattatctactttagtcatgtcaatcgcactaatcgctccaccatctatcgaataagctataattaaaatttcgaaatcttcagcttctgtgtatttataggcaccacatttcgaaatatcgttactgctgtatgtttcaatatctatattcataaatttcaaattcttgacacctcaatttctttaaaattaaagtggggctaaaaaccccacctattgacttataagaaatcctcatcatcagtgtctaattcatcaaaatcatcttctgctgcacttgcaccgccaagaggttcgcctttttctacaagttgaatgttgttcaatccaactgcgatacccttattaccatttgtgttgaatggaaataaattgattgaagctctaatatagtcaccacttacaatagttccagaatccgttaatctaattttgttttggtcaataataccaggtgcttgtttgcttgatgcgttaataaaataagcgtcttgataattcacatcatcttctctttcagtatctccatcacgtaatggaagtttcagatttgcaggaactttgcctccaaacttactaacttttccttcttctttagcagcttctatagcttgttcaatggcttttatcgtacttgtatctgatttaggaatgattaaactgattgaatactttgcttcttgcccttcttgcatactgtgaggttcaaaaatatgtgcatatgatgctcttacttttcctgtaatcactttagttttatttaatacttttgctttcatgtttatataccgtcctttttaatttttatagtttgtcaaaatcatcttcagcagattgctttatagctggtcgtttatcagactcggtagcaagtgttaatttaccttgcggcttttctataaagccttctgcaattttagaaaatgcttttttgccgattaatttttctaaattcgtaatgctaagtaacttggtttctgtaatatcttcaggtttataacccgcttcaactaacctgtctcggactgcttttgtatcagttatcactctccttgaacgtcccgtgactagcttccaacctggatacgttttatcattctctttcgcttgttctaacgcatatttctctacttcatcagcccattttttgatatcaggcagtttatataaaagttctgcaatctcttcatcactcaacaaatgtggtggcttttgaggcacattttgcatgtattctgcacgtgttctacatgaatgctttatcttacagaatctacaatgactacctgctttaaactcaccttcaccgttataagcaagtctggctaagggtttaacaaaatcggttccccattgaagtaatcttgagattggtaactcttcagtagaaaagttatctattcgaggttgtatgatagtcatgcgaactgtatgaatgtcatacactaaactaagcagttcatatgcgcccaagccatataatctaagttgaggattatctatagctgaaacttcaatgcctttaccgtatttaaggtcaataatttcaagtacaccacctgaaaatataatgacatcaccagtaccaaaagattcagggacgtatttacctaaatccaattttgtttcaaataaagctattacatcgtcatctctactcaaagcctcgttatacttttcttctacattagctacgtactcttcaacatattcgcgcaactcttcactgtaatattgatttcgcttataattttgaaaagctttattaaactcaaactgtgttaggccttcatatttaagactgaaatataactcacttaactcatgagcgaatgtaccttcttcagcaaaaactgaacttttatctgcaataccttcacttgccttaatactcggtggacagtttagccattgttttgctccacttgcactaagctttgcatgagctctatttgagtgatctagcttcatgcatttattctcgcattcataaaatcaacaattttttcataatgctcttctttgatagtagatagcttatccgcaccaagttcgttaagtttatttctaaattctttcttatcagaagtgtctgcttttttaaggaactcttttcctactgataaaacataatctttagtcaaatcagcagaagtttccttaacttcttcaattgattccagttgagctgtttcttcttttggcattggtgcttctttaactttctcttgtacaattgatgaatctacagttgatagttcagtgtttaacacacgtaagttcttatttaatagttttaattcttcaaaaataccttctaatactgccattgattaactcctccttaaaattggttagctagacgaatcattaacttgatacgttcttctatttctctagggtcatcactttgttcatttaatcttgctaacaattcaaattgttcttctaaaatttcttttttacgttcgactacacttaaatgcaattgcgattcaataacacgccagacaccccaactttccattgcaatctttccttttttcttaagttttgaaagtgtggattttgcatgtgttttagatatcccaaaagtttcaacaacatcatcagaattgaaattgtcatatgttgcaaaatgtgatagtattttttgttgtaaggtcatattaataactccttatataattatttaagacaattgctcatcttgcactgttacttgctccaacaagtagcagtttttttattcttcataaaagtattccttataaaatatgaatgtcactatacttgcgaatcctgcaattgaccatgctgtagtgaagtacagcaatggcatgagtacaatcgctaagaccgtgaagcacaacactgctaataggtagcttttatatgtgtcgctcatttgataatcctcctaataccattttttatgctttctgatcaaatactcttctaatttagaaatattaatcaatgttcccgttgctgaataatcaatgtataaattttctacacctaaattatcttcacggtaatatttcaaccagttgtatactgtacttctacatactccaaacaattgatggatttgtgtaggtgttgcgtataactttttcacaaatttttcttcgcctcgatatgtgttttctggtgttggtggtattatgatttttggcatctctatcactcctttagataaatgttaaagtttgttattattcgccctgtattgaagttctctatctaatgcatagaaaactttgtttatttctaagtagctgtaatcactttttttaataagttctaatatttccgctcctaagttacgttccttttccgttaaataggatgaagaagcatcagctttgctagaaacttgtgggacgcctatacgcaatccttctgatcttgtgttcatttgtttatgctcctttcgtgtataatgttgttatcaacctaaggaggtgataacatgcccttgacatctgatgaatttgatacacttactaaagaccaacaatatatcttgtccgtactctacaaagattatttagaatgtgtaaagttaggttcgattaaattaacctgcaataattttggaagtgctaaagatatacatacaaagtattttcaaaaactacatttcgaagatgtaaaatacgatttaaataaacttaaaaactctgggttcctaaacggcgtgtatgctagtaacactatttatcatgtaacaatttcagacaagactgttgtttactttgaaaatgagtttaaaaacaatttaaaaagtatcattgatagcatttctataattgcttcaataattcctggtctctagttgggtttataacttcccaatcatttgccatgaggtcatcggctgaaggttgccaatatctgataaggtttgtcccatcgctatttgaaatgatgcattgtaaaaaactatcatttgttggtaatatcttagttcgatgactttctttccaatctttccgtgtcatagagacaagattttttgtagctatcttagttgcttcttgaatgttcatttgttattcctccttttaagatgtttgtttttctttaaatgctaaaataattgatttctttttatcattcgtgaatacgaaattttcgtattcattacctaaaaaaatatcatcatatttaacattaaaagcactcatatacttagaaagtaaactatctttaatgtttgtagagtctttttccatattttgaattgtacgtgatgagaccttaaataaatctcctaactctttttgagtcaatccgtaatcagtcctcaactcttttaatgttttcatgttgtcaccgcctttcgtaaacctaatataatacgaaattttcgtattgtcaacattaaatacgtttttttcgtaaaaaactttactatgatatgaaaatttcgtataataagaaaaaaggaggtaagtaatatgaacaaagaaagaaatattattatagccaaaaacattagaaaatttctcaacgattcaaatatgtctcaaaagaaacttgctgaactcattaacataaaaccatctactttaagcgattatttaaatttacgttccaacccctctcacggcgttatacaaaggatagctgatgttttcgaggttggtaaaagcgacatagatactacatacaaagacgataacgacatcacttccatatacaacaaactcacacctccccgccaagaaaacgtacttaactatgcaaatgaacaattggaagaacagaattctaaaggagataacgttgtagatattaattcatataaacaggagaaaactccagttaacgtcaatggttgcgtctctgctggtgtaggagaacgtttacacgatgaaacgctatttactgaaatggttaaaggacctatccccacacacgatttagcgttaaaagtaaatggtgattctatggaacctatgtttaaagatggcgaaatcatatttgtggagaaaactcacaatataaagaatggacaaattggtatattcatcattgaagaagaagcgtacgttaagaaagtctttgttgaagatgatagattgactctagtttcactaaataaagattacgacgatctacacttttatagaaatgaaagtgtgaggttaattggaaaagttattttataaaaggagcacttgcaaatgaaaaaatatgatattgcagtcttagactttgaaactatgaatgaacatatgaacagcccttgcgaagttgctgtatctttaattaaggatttatcaatagtaaaagtttattcatcttatattaatcctcctaataatagatataacttgaaaaacgctaaaatacataaaatacctgaagatgtcatattaaaagcacctaaatatccagatatttaccaagaaattctctatcttttaaaagaatcacatttaattattgctcataatgcactttttgatatttcagtattaaaaaatactaataattattatgacttacctgttccaaacttcatgtatgtcgatagtataaatatctttagaagcttccacgcaatctctagttttaaattagaaaatttgtgtagcttatatgatatcgataaagaaaaattacattctgctaaatttgacgtgctagctttatcgaagatgttgatatcactcgctaaaaacaatcagcattatagtgtattaaaattaatacattatatgcctaagcaatacattagatttagcaaatattctaactctccaactaaacttttcgattcaggatttcaaaaaattcatatgaaaatatctgagattaataaaatagaagtggaaagtgtaatccctattttaaaagataaaaatgttgtttttacaggtaattttgacactgaaaaacaagatttaatgatattaactagaaagaaaggagcttatatcagaagtgacgtaactgcaaaaacagatattttagtcgaaggtgttcaagatgataaatataaagatgtgaacggactagtttcaaaacaacgaaaagctcgagaatatgttggaaatggtgcaaaaattcaatttttaaatgaagaagacttaataaatttaataaaggaataataacgatgatcaaaaaaatttttacaaaaaaacatgtattcttagttatagaagatgaaaaccataatcacagtgatgctgtttttggaaaaagtatattactttcaatttacgtcggtgtgaataaaaagactaattctaaatcagggaaatttatataccttgacagatctaaaagaatcgttagacaatctgatatcaccaaaatagaatcagctaacgaaaatgatgtagatttttataatttactgaagaaagaaaaggaaattgtttattccaaaaatatagtagataaatacaatttagcgaactatataatttactacgaagttagtactaaagaataaaccaatccattatttcataatactaaccttaaatttacagaggttttaattatgaaacatgaaaaaagcaatcttaactttaagtcttatatttattacctactacctcacttttaaatatatgtggattaaagaattgaagtattaatcatgcttatttgaaaaagacgtctatttcagcagtgtttgaaaggaagtttataatgaaaataactaattgcaaaataaaaaaagaaactatagtatatgaagttttaactagtggtaatcaaccattcacttatgagttacctaaagatttatcgtcacataatgcgcgtaaatacttggaatttatttcacaaaaaatagatggagataagttaaccaaagaagattcattatgattttactaaataaaaaaacgcctactagtgtagacgttgaatggtggtgagaattttatggcggataaaaacaaaaaacaagaagctacccgtagtaacccaataaacaaaagttttgaaaagccgggtgccagcgaaaacttaaaaagcactttatcagaaaaagctaagaaaaaagattaatattcattcattaaatataaatccaatttaatttgttgtttaaggtctacaagtgtatgtttaatatacaattcatcgtttgacggtaaatcagatactttgaaatcttgtcgctcaacctctagtaaatcgaaatcgctaccagctgaattataggttttaagttcaccctcttcaatgattctgttttcaaagtctttaataactataaatactggtttaccgttgttattaaacaacttgtctcttttgtctaataagcttatacaatccaaattcataaactttcttgtttcattaattaaccagataatgaatttaacaattaaaggattaaatacaagcactgttaaaacaaaaataattagaaaccaaatatttgcttttagacctgtaagcaactgaagtaaactcaaattttttaaatcaacattattaaaaattataaaagtataaaaccatatcaaacatgtttcaatagaaaaaatcaataatacaggagtattgataatcttgtttttttcactaactaaacctatcattgttagatatttatatggtatgtaacctaaaactcctgtaagaagaagcgcccctagaaattgagtcatcttatcacctactttttattttattataacatatttagtacctagtactaaattttgggtagcccacctacccttattattttttacaaatttacagaacgtacgttctctcaggaggtataaacatgtggattgaaaaatttaaaaacaaaaataacgaaactaaatacagatactacgagaagtataaagatccatacacagataaatggaagcgcgtaagtgttgtgttgaacaagaatacaaaacaatcacaaaaagaagcaatgtttcgtttagaagaaaaaataaaagaaaaactaaacaacaagtcgtcaagcgaattaaaaactttgacttttcacgcgctattagatgaatggcttgaatatcatataaaaacatcaggttcaaagttgactactcttaataatataaaaataagaattaaaaacattaaacgatactgctctgagaacttgcttttaaacaaacttgatacaaaatatatgcagatatttattaataaattatcagatatctattctcaaaatcaagtaacccgtcaactcggagatatgaaaggagctattaaatatgcagttaaattttacaattatccaaatgaatatttgttaactaatgtcaaaattcctaaaagaagaaaaacaatagaggatatcgaaaaagatgaatctaaaatgtacaactatttagaaatgaaccaagtcctacagatacgtgatcatatactaaatgataataagttacaaaagcgaaatcgcattttaattgccagcatcttagaagtacaggctttaactggtatgcgcataggagaactacaagcactgcaggaaaaagatatagatttattaaacaaaactatcaatataacaggtacaattcaccgcattaaatacgagaaaggattcggatacaaagacactacaaagactataagttcaaaaagaagtatcagcatcaattctagaaccgtagaaatttttaaaaagataatactggaaaacaaaatgttgaaaagatggaattcgagctatgttgacagagggttcatattcacaacaaaaaaagggaatcctttatgtaataatcaaatcgccggtgtgcttaagaaaactacaaaagctttaaatatgaataagaaagttaccacgcacacatttagacatacacacataactttattagtagaaatgaatgtttctttaaaagcaattatgaaaagggtaggacatgtagatgaaaaaacaaccattcgcatatatactcatgtaactgaaaaaatggatagagaactaactcaaaaactcgaaaacattccaagttagcttaaatctgccctttttttgcccttatattttttacaagctttataaaacgcttgagaacactggcgttaaagcttttcttgaattaaacatatcgtcataatgtgatggttcaaatatcatttgtacaatcaaaggcttcatgttcttaacaatatcatctaaatggttatctaaaattggtgacactgcttttaaatcattaagaaaaggctcccatttgcctaaagtattatctaattcttctaatttagttttaatataattacaagttacattaggaatcagggacaaaaattctttcttttttacatttaacatttcaattgcatgtcttaaattcttacgtattttgggaattgtattaatcaaatattttattacatcgacaattttcgatgcatattcatcatatataccttgaacatagtctgctatttttttaataccatcatcgatatggtcttttaatattttcatttttcttcctaaataattagaaggtataactagaccctgtaccatattttcgccgctacaattaatttgaaaatttccatctaaaattgttgcatcttgttgtttcataatacttctaatatctgcaatttgcctaccataaatatcattttgattttttatttggtctatattctgtttcactactttcaaatgtttcatcatttcttcagatactccatctctgaagtcgtgatctatatttttgaaaatttctaaaatttcattatctatactatcatacactttttctataaaagattttatacctttaaacaactcattaattctttcttttaatgcatccaatgcaaaatcaggtaataagtgtttaacagcactaatactttctattgtttcatctgcaacttcttcaagtgagtttattttactaattaaagttctttccatttcttctaactgaaataagttaatcttatccttaaatccttctgataattgtttctttctatctgcaaaatttttattttcattttctgagatgttaaaactttcatttaaaaagattacgcattctgctaacataccacttgtttcaccagtaatcagtttactcaacgcatcaagattttctaaattaagtttaattaaagttcctcttccagaacgtgcaatcgaatctcctgtccaaacatttattggaattcgcccatccatatctaatgttatgttaatagtcttttttactttttttccatttttaatttctgtatcttttaccgactttattttgattagtggtacagtatcgtatgtgttatcttttctatttaacttccttttataacctacatggctgtctattaaagtatctaacctgggcacaccatcattaatgttaacgcgttttcctggcatatctttgatgaatggatcttgtaaccatgttaataaatcgttggtactattaaaactaatcatattatcaaagcgtggtctagcaaatttctgccaagcagcataaggaatcattgctgagtcagtagcaacaactttttcattcggatgtttcgctccttgatattttgctcctgcaccgccttccgaattaccgccatccgccacaatggttttgtttttgaagttacttgattccattctatatttttttaaaaaatcactatttgataatctatctgcatcttctaactttattttatattgatttgataattgatctgtttgctttaaataatctgtgctttcattatcattattcattaatttagcattttggagccaatcatctccaaaccccgatgattttaatggattatttggattaattgcctcattagatgttccttgataaattattgtctgttgaccagttggtttacttttatcatctaataactcatatattttaatatcagcagcaccattcaaattactattcttatcatcattataactgtctacttgtttaaacctttttccattaactttaaattctttttttatatcaatattttgataaacccagtaactacttaattctgttaaatccctatcattaattttattcatctttactgtgcaccccatattctattggacgattatcatcataaaaggctttcttagtattaatagtgggtttccctatttgtattgtgattgtagatttatctggtttattttttaaattatataatttatcacttagttcgattacatcatctactgtattgtctttagtaaagtttttcttagtagaaaaaagtgtagcaacagcatctgtatttgcagcgtaattcacttcttttcttgctcgttccattccttctttaaattctttatcattttttcgaatcagtggttcataatactttcgatattcttttaaacttctagaagagtatgtaatataaaaatattcatttttatatccgacattttgtgtcttgttaattgcctcttttgtaaagcctgtatattgatatttcttttcattttctttgaagaatttatataagttatcatacttttctttttgcgctcgatattcaaagccactcagcactgtacccaccatcatactcatatcatcaccattgtcattactgcgcattgatcctttttgatggatggcatctttgtacaaaggtagacttgcattaaatacaatgccatgatcttcacaatgcacataaacttctacaccatcatctttacctacaacatttgtagctttaacttttagtccaaagttatctttaaagaattgttcacctactttttcaaattctttacgatgcttcttcgcaaattcaatcgcatttttttctgcaggcggttggaagccttggcctacatattttgaagcttccatttcttctggtacagattttgtttctgtttttgtgtctttttttgattcattttccatcgtggaacatccccctaaaattaatgtcgtagctaaaactgatccaatgaattttttcatatgacacctcgaataatttaattaatacaatatatctatattttaccctatttttataatcaaataaataactttatcaaactttatatttttgtataaattagtaatatatttaatagttgatattcgcaaaaaccctaagttctaatccacatacaaaattccccacatcaatcaaaaaacgcatgctataaattagagtctctaatcaataacatgcgttctgaaataactatattcaattttattctggttttggtagtttaataataaatgttgtgcctttccctaattcgcttttaacatctatggaaccaccatgctcttcgataatcattttacaaatgaacaaacctaaaccggtaccttgtttacctcgcgttctcgctgcatcaactttataaaaacgatcaaatacttgttgtaaatgttctggtgcaatgcctgtacctgtatctttaatgtataaaatatcttcgctttcattttcatcacaagtaattgcaatttcatctccaggtttcgtataacgtgatgcattatcaattaagttcgttagtacttggtccatgcgatccatatcataactccaaacacgcttcttacaataattaaaagtcatatttagacctaaatcatcagcttgttggcgatacttaattttcatcttatctagtaacgctgcaataggctgaacttctttatttacggataacccttcagcatccatgcgtgcgacatttaacaattcattaactaaacgatttaaacgtttcgattcatcaaggacaatggcaagcgattcttttatttcatccggttctgtaacaataccatctacaattgattcagtataaccttgaagtaatgatatcggtgtacgtaattcatgtgatacattagcaatgaaatctttcttcatttgatctagattgtgctcattagtcatatcacgaactgtcacaacaacaccacttttacctccctgttcaatcttgtcgatatagcttgtggtcacaacaaagaatcgtgcattcatttctaaatcgcgcatttcagtttgttttgatttaaaagtatcttctatttgtcttaataagaaagctttagcatcttcatcaatattgtccataatatcattcgccatcttattagataagataatttgtcgactctcattaatacctaggacaccttctaccatagagttaattaagctgtctctaatatttttagatgtggataatgcgtcgacatgctcttcgatttctgtactcatctgattaaatgcctgcgataattgaccaatttcatctttcgttgtgacagaaggtttataagagtaatccccttcagatacacgtgtagcttggtctcttaaacgtcttaaaggttttgtaattcttgacgataagaaaaacgcaaagactgttgtaattgttaagaaaataacagccgtaattatggtgataatcgtaatagcattatttgtatcttcgattgatttcaagtctttatatataaagactccactatatttgctatgactattcttctgtgcttttgttggatagcctaacaaaatatatgtttgagatgagcccttttctttaatcgttacatttcgagtaacagatttacctttatcaaacacatcgtcaaaatggtcgttgttgactacttcattcaacatttgctttttaatattagaaagtgaagccgttgattgacgatgtttattatttataatcatcaacccaccaggattttcaattaatgtttgactatattttattgcttcttctttattatgtgattgttcgaccagtgaacttatacgtctagcatcttctcttatggcattttcggtttcttgtgtgaaatagtattgcataaaggtaattaaagcaatacttaataaaattaaaactgtcgtcactattaaaataatagttaaccacagtttaattacgacactatttagccggctcatcattagatttaacctcaaatttatacccaacgccccagactgtttgaatcatatgcgcagcttcactagacacacgatttaacttttctctaagtcgtttaacatgagtatcaactgttcttaaatcaccatagaattcataatgccaaacttcttttaataattgttcacggtcaaatactttatttggtgttttagctaaatatattaataattcgtactctttaggagtcaaattaacttcttgattatcagcaagtacgcgatgtgcatcattatctatttctaaatgtttaaattcaatcacatcacgtgcgtgaggttcgctttgttctacagttgtagattgcgttcttcttagaagtgctttaactcttaagactacttctcttggtgaaaatggtttgacgatataatcatctgcaccagattcaaaaccttcaacacggtttgtttcttcacctttagcagtcaacataataatcggtgtttgtttatgttcacgcaatttagttgccacctggataccatccatttcaggcaacattaaatctagtagtatgcaagcataattattctccattgcaagttcataagcctcttggccattacttgcttcatggatttcaaaagattctctttctaaatacattttaagtaatcttctgattctatcctcatcatctacgataagtatttcgttcgacatacaggtcatacctcccacacatgcttttctttacaaaagtattatatcacaggaaagcgcatacagttattaaaaacctaaaattttgtgaaaaaattctcaaactttgtgataaatacatattttatttaattatttcccatgttctgctaaatgacgcatcacttttacttcatgaggcgtcaatacacgtccttcaccagcattcaaaccgacaacatttaaaggcccatattcaatacgagacagtttcgtcacttgatgaccaaaatgttcgaacattcttctgacttggcgattacgaccttctgtaattgtaatttcaaccaatgttgtgtttttatctttatcttgtttcttaactttcacttcagccggttgcgtcataccatcttctaattcaatacctttttctagcgctttcacttcttctctcattaaataaccttttaatttcgcaacatattttttcttaatttgatatcttggatgtgtcattaaattagtaaattcaccatcatttgtgagtaataacaatccagaagtatcatagtctaaacgaccaacaggataaatacgtgcttctatatctttaaagtaatctgtaaccactgtacgtcctctatcatcagatacacttgttatcacttgagttggtttatggaataaaatgtaaattttgtcttctagttctattttaataccttcaacttcaatcgtatctgatggcttcacttttgttcctaattcagtgacagtcgtaccattcactttcacttttccttcagaaattaaagtttctgccttacgtcttgaagtataaccgctattagctatacgtttttgtaatcgttctaattctttagtcattattttctcctttttgattgactagattactgaaaaaagcatccatttcttcatcgtcttcttcagttgtcggcaaatcttctatattggaaataccaaatacatttaaaaataaatcagtagtaattaactgttggctacgctgttcattaaccactttagcctcaactagtcctttggcaatcaatgtcttaactgcaccatctgaattgatactacgaattaattcaatatcacttcttgataatggctggttataagcaataattgatagtacttccattgctgcttgtgataatttcatttgtgacttttgttcaattaattgttcaatatacgttgccgcttcttttttagtcgttaaaacatacgtcattccaaatcgttgtatcattaatccatgtgatgaataattttcaattaattcaacgagttggtctttcgacatatctaatatttctaatagttgtttttcatctaaaccttcatcgccagctgtaaataaaagcgactctaatataccatgattatccaaaatggtagttcactcctctaataatgttaatatcttcaaaattacgttgttgctcaatattaattattcctgcttttgacatctctaaaatagctaaaaagtgagtgactacttgttcaattggctcagaaaacgtaaacagactaaagaagttaaaatgatctttatctttcaatctcgatgtcacttgttctgtagcttgttgaatggtaaatgtctcttttcggatttcaacagatttaggtgtatttaactcaactctatttttaactctttgataagctacaattaattcagttaaatcaatcgtatgatttggatcccaagattcatctgtttccaaatgagataaatctgtcggtctttttgtaaaataaaaatctctttcttctttcatgtcatttaaaatagcagtatattctttataattttgatattctattaaacgcccaactaaatcttcccgtgggtcatcatcaacatccatatctgatgttgattgtggtaatagcatcttacttttaatcattaagagttctgacgctaatactaggtattcacttgcaatattaatttcaagctgtttcattgcatgaacgtactgcatatactgctctgttaatgcttgcataggaatatcataaatatctatttcaaatttttggataagatgcagcaataaatctaatggtccattgaaagcatctaatttaacttcatacataatatctacctcgtattgcgtcatatgtgcataattctctaaaatattatagcatgaaaataacttacttttaaattggggtgataacaaaatgcaacaggcactgataaatttctattatcaatttcatactaagcaacattatttcctatgtcatgacattttagaagatgcatggaaagctgaaaataactacagtaagcaagatgcagttgttagtttaatcttgtttgcaactgcttgttaccattatcgccgcaataatttaaaaggcgcctataagtcttttaataaatctaaagaaataatacaaaatgctaaagatagagatgcgttataccttaatttaaatgattatcagttgttaattgagcaacagattgcaaaattgaatgcagcaaagcctttttcatctgttatattaccaataactccagtctttgaacgcatcatcaaggccaactatccagactatgattataatcaggaaacagcaacagatccttttattgtagaccatcacatgcgccgtgatcgttcagaagtgattgcagcaaaagaagaagcgattcaattaagaaaacatagacgtaattaatcaaccaatttaaaaaagccacaatagcacagacatttttagtcatgtgtattgtgacttttgagttattgttcactttatgctctaggatgaaattggttatacatttttctaatttgagatttcgaaacatgtgtatagagttgggtagtagatatgtcagagtgacctaacatctcttgcactgctcttaaatctgcgccattttccaataaatgtgtcgcaaaagagtggcgtaacgtatgtggcgttaacgtctttttaatgtttgcctttacaccattttgtttaatcattttccatattgcttgtcgtgataaaggtttaccatgcatatttaaaaataagacttcagtaacagtcttttttaaaagttgcggtctaatcgtttcaatataagtagttaagtactcaatgactgcgtcgcctaatggtacaattctttctttatcgcctttaccaaatacgcgtacaaatcccattattaagttcacgttttctaactctaaatgtatcaattcagatacacgcattcccgttgcgtacagaagttctaacatcgtacgatcacgatatccattaattttatttaaatctggcgtttctaataaagccaacacttcgtcaacatttaaaacgtcaggcaattttttgtcatattttggtgaatctaataataccgttggatctttcgccgcatatttttctcttatagcaaattgatgaaaactacggattgttgaaataaatcgcgcaatagatttagcagattgcccttggtctattaaatgccccaaacactcttgaattaattgtcgatctataaaatcaatatgcgagatatgatgttcagtcatataatcttgatactttttcaaatcacgtctataagcaccaattgtgttagaacttagtcctttttcaatttgtataaaacgcaaatattcttcaataattgtttccataaccacacctctaaaaaaagcgaaggttaatttaacctacgcaatttactatcctttacctttagcttggcacgtttcacacacaccatggaaagttaaacgatgatctaaaattttaaaattgaactcattttcaactcgattttcaacttctggtaacaaatcttcatcgatttcatctacacgaccacattccatacatactaaatgatggtggaaatgttttgcgccttcttttcttaaatcaaaacgagcgacgccatcaccaaagttaattttgtcgacaacttttagttcagctaacaactctaacgttctgtatactgtcgccaagccaatttcaggcgctttatcttttactttcagatatacgtcttcagcacttagatgatctttttcattttcaattagaactctaacagtagcttcgcgttgtggcgttagcttatatgatgattgttgtaattgttgcttaacgcgatttaatcgttcttccaacgatgtccactcccctactaataattaaaatcattacaaattatttcaaactttacaattaaaactaacagttttctcaataaaatgcaagcttttctcatttgttatttagaatgattataatttaataataggtgttgcaatgcaatgatagtcttcgcatcttctatttctttattcattagcatcgatttaacattctcaatcggaactttaatgacttcgacaaattcatcttcatctaagtgaactgtaccttcttctaaattatccgtaaaatatattgataattgttcatcgcaaaaacctggtgaaccatacatatctacaacatgtgttaactctttggcaatatatcctgtttcttcttctaattcacgttttgccgcttcgactctatcttcatcatcttctaatttaccagctggaatttctagcaatggtttttctactggtttacgatactgtttcactaatacgacttcttttttaggtgtcactgcacaaacagcaactgcaccattatgataaactaattctcttgttgacgtttcaccgtttggtaatgtcactgtatgaatttctacatctacaattttgccattataaataactgttcgatcaattgttttttcatttaaatccattataatcacgttcctttaaattcatattatatattgatacactatgcttgttagctaaagtgtatcgaaaggagaacagacatgcaaaaaaatatattaaaaagtggtatttcattatctgaattaggtctaggttgcatgagtttaggtacagatttaaaaaaagccgaacaaattatagattgtgctgttgaaaatggtatcacttattttgatacagcagatatgtacgataaaggtataaatgaatcagttgttggtaaggcacttcttaaatatcaacaacgcgatgatatttttattggtacaaaagtaggcaatcgtttaacaaaagatggcagtacaacatgggatccgagtaaatcctatattaaagaggcagttaaaggttcactaaagcgtttaggtatcgatcatatcgatttatatcaacttcatggcggaaccattgatgacccattagacgaaacaataagcgcatttgatgaattgaaacaagaaggaattatacgtgcttacggtatttcttctattcgcccaaatgtaattgattattatttaaaacatagtcaaatcgaaacgataatgtctcaattcaatttgattgataatcgtccagaatcattattagatgcaattcacaacaatgatgttaaagtattggcaagaggacctgtgtctaaaggattattaacttcaaacagtgttaatgtgctcgacaataaatttaaagatggtatttttgattattctcatgatgaattgggtgaaacaatagcctctattaaagaaattgaaagtaatttatctgcattgacatttagttatttaacatcacatgacgtgcttggttccatcattgtaggtgcaagtagcgtcgaccaattaaaagaaaatattgaaaactatcatactaaagttagtttagatcagattaaaacagcaagagctcgtgtaaaggatttggaatataccaatcatttagtgtagaagtcattttcagtaataaaaacagcagcatgaggcgtttcattataaaaatgccttactgctgttgtttatgtacaattcgctataatttatgattatgattactcacttatgatagaaattaaagcgttgtcctcacgcatcagtatttagtaatttcgccttgcggcattgccttaagcaaacttctgccacttcatctcttaataattttattaaaacatctttctatatttcacttcgcatgttgattcatcattattagttattatttgtacacccagcacatttccttgcaacacaagtagtttgaatttttcacaagtataatataatgtaccgtctgaaatttggtctacagaaatatcgcctaaaatatccagcactgtaaattcttcaaatactgatagttgttccgcatatcgtacacaaagtcttaccacactctccgattgacagttcattgccatcccacctatttatgctttatttttaaataatttagggaaacatcgttcaaaaaatctaggcgcaatttgatacattttcaacgcatgatgcatccatttaggccgattaatttccaattgttttgttttaatgccataaatgatatcttctgcaagctgattagcatcaagcataatttcccccatctttttagcatacttcattgatgggtcggctttttgatgaaaaggtgtatcaatcgggccaacattaactgtcatgatatgtaagtttggtgactctagtcttaaagcattcattaatgcataaaaccctgctttcgatgccccataatgtgcagcatttgcttgtgtggaaaatgcagcttgacttgaaatacctacaatatgtgcgttagatgttaaatatggtctcaacacagtatataaaacattaaaactaattaaattaagctgatacgtttcaatcatttctgaaaaactatggtctgaaatagatttgaaataacctaaacctgcactataaatgaatccatcgaatgatgtattgtcttcaaattgcagtgcctgtatcgacttcaaatcatttaagtcacaaggaataacatttatagttttccccaattcctgttcaaagattctagttgctttatcaacatcacgcaccaacaacgttacatgcactttattttctagtaactttcggacaatcgataaacctaaaccactcgtaccaccagtcactataaaatgttgtcctttcatcaattaaccttccttttcaattatatagaatgcaatttatcaactttacataattgagacaagttgattatctttcctaatatatatacaataataagaaaatataacatacaaatcaaaaactaaagggatgtgacgttaatgaaactcgtattttatggagctggtaatatggcacaagctatatttacaggaattattaactcaagcaacttagatgccaatgatatatatttaacaaataaatctaatgaacaagctttaaaagcattcgctgaaaaactaggtgttaactatagttatgatgatgcgacattattaaaagatgcagattatgtatttttaggtaccaaaccacatgactttgatgctctagcaacacgcatcaaaccacatattacaaaagacaattgcttcatttcaattatggcaggtattccgattgattatattaaacaacaattagaatgccaaaatccagttgctagaattatgccaaacacaaatgcgcaagttggacactctgttactggcattagtttttcaaacaactttgaccctaaatctaaagatgaaattaacgatttagttaaagcatttggttctgtaattgaagtatcagaagatcatttacatcaagtaacagctatcaccggaagcggcccagcatttttatatcatgtattcgagcaatatgttaaagctggtacgaaacttggtctagaaaaagaacaagttgaagaatctatacgcaaccttattataggtacaagtaagatgattgaacgttcagatttgagcatggctcaattaagaaaaaatattacctctaaaggtggtacgacacaagctggccttgatacattgtcacaatatgatttagtatctattttcgaagattgtctaaacgctgccgtcgaccgtagtattgaactttctaatatagaagaccaataaaaacaaacccgccaacacatgtatgcatcatcgcaagcactgtgtttgacgggttatttttataatttattgttatttggcaagcattgtttattactttgtcattagattttaaaactatcaaaatcttttacaaaattaaaattaggtgtatcttcattttgtatcaatgtttgataaatttcatttatatcttctgtattatagcgattgctcaaatgtgtaatcaacgtacgtttaacattggcttcttttatcaatgcaaatacgtcttcaatatggctatgatgataattgttggctaaatgcttttcaccatctatataggtcgcttcatgtaccatcacatcagcatctctagaaatcacacgttcattagaacatggttttgtatcaccaaaaattgctacaactggaccctgtttggactcacctctaaaatcttttgattgataaacttgaccattatgttcaaatgtatcatgagattttacttcttgatatttaggacctggttcaagaccaatgttttttaacgcttcaacattgattgtacctgtagtttcaggtgccattactctatatccatatgatggaataccatgattaagtaaatgcgcctctacagtaaaaccatcatgatgatatgtcagatgatcatcgatttcaatatatgtaattggatagtttaaatgtgactctgataaattcatagacatttccacatatgctttaattccttttggtccaaccaatgtaagcggcttctgttcaccgccctgaaaagaacgactagaaagtaatcctggcaaaccaaaaatatgatcgccatgcatatgagtaataaatatatgtgtcacttttcctaatttaattgcatgatgtaaaatttggtgctgtgtaccttcaccaacgtcgaaaagccatatggaattggaatatggttctaaatttaaggcgattgcttgtgtatttctctcttttgtaggcaaacctgcactcgttccaaaaaatgtaacttccatatatgcccctccttttcttcaattcattttatcataaaatttgtatcaatttagttttaatttatacttgaatcaaaatctgttaaaaattcgtctttgctagttaatttttctaactttaacgtagacataactatataaattttgataattacgttatacttatcattaataagtatcacattaaacatgatacatgaatcgatatttcatttaagacactgcatacagtcgagcatattgtatgacctactgaatggattatcttataataataaatcatatatctaattaagaattgaggttttaatcttgagtactaaaaacaaacacatcccatgtttaatcacaatctttggtgcaactggtgacttaagccatcgtaagttgtttccatcaatattccatctctaccaacaagacaatttagatgaacatattgccatcatcggtattggacgtcgtgacattactaatgatgatttccgtaatcaagtaaaatcatcaattcaaaagcacgtaaaagatacaaacaaaattgacgcgtttatggaacatgtcttctatcatagacatgatgttagtaatgaagaaagctatcaagaattactagattttagtaatgaattagatagccaatttgaattaaaaggtaatcgactattctatttagcaatggcaccacaattctttggcgttatttctgattatctaaaatcttctggtcttactgatacaaaaggatttaaacgccttgttatcgaaaaaccattcggtagtgatttaaaatcagccgaagcattaaacaatcaaattcgtaaatcatttaaagaagaagaaatttatcgtattgaccactatttaggaaaagacatggttcaaaatatcgaggtattacgttttgcgaatgcgatgtttgaaccattatggaataacaaatatatttcaaacatccaagttacatcttctgaaatactaggtgttgaagatcgtggtggttattatgaatcaagtggcgcgctaaaagatatggtgcaaaaccacatgttacaaatggttgcattattagctatggaagcacctattagtttaaatagtgaagatatccgtgctgagaaagtaaaagtacttaaatcactgcgtcatttccaatctgaagatgttaaaaagaactttgttcgtggtcaatatggcgaaggctatatcgatggtaaacaagttaaagcataccgtgatgaagatcgcgttgcagatgactctaacacacctacctttgtttcaggtaaattaacaattgataactttagatgggctggtgtaccattctatattcgtactggtaaacgtatgaaatctaaaacaattcaagttgtcgttgaatttaaagaagtaccaatgaacttatactatgaaactgataaactgttagattcaaacctattagtaatcaatatccaacctaatgaaggtgtatctttacatctaaatgctaagaaaaatacacaaggtatcgaaacagaacctgtccaattgtcttactcaatgagcgctcaagataaaatgaatactgtagatgcatatgaaaatctattatttgattgtcttaaaggtgatgccactaacttcacgcactgggaagaattaaaatcaacatggaaatttgttgatgcaattcaagatgaatggaatatggttgatccagaattccctaactatgaatcaggtactaatggtccattagaaagtgatttactacttgctcgtgatggtaaccattggtgggacgatattcaataattgaattaaaacgcacatgttaaacaaaaataaatgagcgaatgacaaggattgattacgaatcaagtaaatcaattgttctatcattcgctttttttctagactatattatgaaattatattttacaatgcccaaaactattttaataatcattgaacaaatgggtgtataatttatagaaataatgtagaataaaaataaatgattgaattaattggagtgaaagttttggacgttatcaagcaaatacaacaggcaattgtttatattgaagatcgtttattagagcctttcaatttgcaagaattaagtgattacgttggtctttcgccataccatcttgatcaatcatttaaaatgattgtcggcttatctccagaagcttatgcacgcgcgcgtaaaatgacactcgctgcaaatgatgtgattaatggtgctacacgacttgtagatatcgctaaaaaatatcactatgcaaattcaaatgattttgcaaatgattttagtgattttcacggcgtatcacctattcaagcctctactaaaaaagatgaattacaaattcaagagcgattatatatcaaattatcaactactgagagagcaccttatccatacagattagaagagacagatgatatttcattggttggatatgcacgatttatagacactaagtatttgtcacatccttttaatgttccggattttttagaagacttgctcattgatggtaaaattaaagagttacgacgatataatgacgttagtccatttgaactatttgttattagttgtcctcttgaaaatggtttagaaatatttgtaggtgtaccaagtgaacgttatcctgcacacttagaaagtcgatttttacctggcaaacattgtgcgaaattcaatttacaaggtgaaattgattatgcaactaatgaagcttggtactatattgaatcaagtttgcagttaacattgccatatgaacgaaatgatttatatgttgaagtgtaccctctcgatatttcatttaatgacccattcactaaaattcagctttggattcctgttaaacagagtccttatgacgaagattaaataataaaaaacaaagaagccccctaatatatctataggtctacaaatggccttagattctattagggggcatattaatatgttaatttagttcgataacacatgcttcatatggacgtaactgttttaaattaactttggcatcataattaaatagctttacttctccatggcttaaatcaaatggtacagttaattctgcttcgtggttagtaagattacctacaataagaacttgcttttcatttaatgttctcgtgtacgcaaaaacttgtgaattttcagcatctactaaatcaaattgaccatatacgtatacatcattagactttcttaattgaattaaatctttataaaattgtaatactgaatgctcatcttctaattgttgtgcaacattgatagttttataattcggattcactgggaaccacggttcaccatttgtaaatcctccatttaacgtatcatcccattgcattggtgtgcgagaattatctcggttctcatctttatatttcgcaagtaaagcgtctacatctccaccttgagctttcactatttgatagtcatttttaacagcaacatcgttaaacgtttcaatactttcaaatggataattcgtcataccaatttcttgaccttgataaatgaatggcgtaccttgttgcaagaaataaacagctgcatgacttgttgctgattcataccaatacttgtcatcgtcaccccacgtcgatacacgtcgtggttggtcgtgattttcaataaacaacgcattccaacctttattttcaagttgtttttgccatctatttaatacagatttatacgaatttacatcaaagtgagaatcaccactattccacagtcccaaatgttcaaattggaatatcatattaaatttaccattttcttccccgacccagtcatcagcatcatcagggcttacaccattcgcttcaccaacagtcataatgtcatacttacttaatgagcgatctttcatctcttgtaaccaagtttgtatacctggctgattcatatctacatcaaatgctggggcatatgttttaccctcaggtacaggtaagtcacccgcttcaaacgtcttcttaatatgcgtaattgcatctactctaaatccatcaatgcctttatcaaaccaccagttcatcatttcaaatacagcatctctaacttccggattaccccaattcaaatcaggttgttttttactgaataaatggaaataatattgctcagtattagcatcatattcccatgtagatccattaaatatactttcccagttgttaggttcagagccatctggctttggatcttgccaaatgtaccaatcacgtttgggattgtctttactagatttggattctataaaccaaggatgttcatcagatgtatgatttacaactaaatctaaaataagcttcatgcctctatcatgaacaccttttaataaacgatcaaagtcttccatcgttccaaattcatccataatctcttggtagtcactaatatcataaccattgtcatcattaggtgatttaaacattggactgagccaaatgacatcgataccgaaatcttttaagtagtccaatttatcaatcattccaggtaaatccccaataccatcgtgattactatcattaaaacttcttggatatacttgatatgctactgcttctttccaccattgcttattcattttaaaactcctttgctatcgctgtgttgattttcttatttttaattctgtatctataatgacgagttcaataacatcctgtgctttgtttttcaatatatttaaaattgctgcaccagcctgttgacctaacattcgaggcttgatgtcaatacaggtttgtggtggtgacgcaatttcggttaaataagaatcattgaacgttgctgtcattacatctttcggaatttcaatattaagttcatataggacacttaaaatcgctaaatgtaacatagcatctaacgaaatgattgcctgtttaatatttgggtccttcaaacgcgtatgtagattttgcatgtaattaaaaataacttctctttcattactagtctcaataatttgataattaattttattttgagaagctatcgtttcaaatccttgaattctatcttttgaaacttcaaaatttcctttttctgtaataaatattaattcatctacaccttgttcaataacatgtcgtgtcaaattttcagaagctaatatattatcattatctatatgtgtaaattgatgatctatatccgatgtaggcttaccaatcacaataaatggcatgctttcatcaattaacatttgtttaatcggatcattttcttttgaatagagcagtataaacgcatcaaccattcgttgtttaatcattttataaacttcatccattaaatcattcatattatttgagactgtcgtttgtgtaccatagccatgctggttacacgtttcagaaattcctagcaatacattgatgtagaatggattcagtcgaataggctcctcagacccttttaacactaaaccaattttatatgtttggtttgtaattaaagttctagcagcggtattaggaaaataattcaattcttccataactttcttcacttttgaaattgtcgcttcgctaatacgttgatttccttttataactcttgaaactgtcgaaggagaaacaccggcttttagtgcaacatctttaatcgtaaccatttaatcacctcctgttaatttctgcatcggaaaacgcttccaaccactgtataataccagtttagtcacactttctaaaaaagtcaaaagatttgtgcaaacgattgcataaaacgataaaaataaaaccttcatactgaaattcaatccgaaaatcaatataaaggtttgtataaatattaaaatcgattgtttagtcactaactgcaaaatagttaccttggccatcttgaaaattaaatacacgttgaccattcatttctactatatcatgcccagttaaacctaaatcatttaattttgagtataatgcatcaaagtttttctctttaaacattaaagatggtgttcctaggttcacttccgggctatgcttttcaataaattcttttgccataatcgtcaatgacgtttcagcatctttggtaggtgatacttcaactgcaacatagtcctcagctaacggtgtttcacttacaacaacaaattctaaagtttctgtccaaaatgctttcgctttttcgacatcatcaacatataacataacttgatttaacttttccataaaatagtacctctatttctctatagtacatgctatcataacacagtaaatattttattacttcacaaaatgcttaaaaatatggcgggatgcttttaaggtcaaggataatacttgtgtaattttttataggttgtagctactctatcacactctcttttatatttatcaaaagatataaaaaaggatagtatctttcaactatcctttaatcaatattattcttcaatccattgtgtatggaatacgccttctttatcttttctttcgtacgtatgagcaccgaagtagtcacgttgtgcttgaattaagtttgcaggtaaatcagcagcacggtaactatcatagtaattaatacttgatgagaaaccaggtgttggtacaccattttgaacaccagttgcgacaacatcacgtaacgcatcttgatattcagtaacgatgtttttaaagtaaggatctagcaataagttttgtaatcctggattattatcgtaagcatctttgatcttttgtaagaattgtgcacggataatgcaaccttctctccaaatcatagctaaatcaccaagttttaaattccattcattatcttcacttgctttacgcatttgcgcgaaaccttgtgcataagaacaaattttactcatatataatgctttacgaattttttctaaaaagtctttcttgtcaccatcaaatgatgcttttggaccatttaattctttagaagcatttacgcgctcttctttgattgaagagataaaacgtgcaaatacagattcagtaatgattgttaatggaatacctaattctaatgcgttaattgaagtccattttcctgtacctttttgacctgcagtatcaagaattttttcaactaatgcttctttattttcatctaatttcatgaaaatatcaccagtgatttcaattaaataactttctaattcaccagcattccagtctttgaacgtttgagcaatgtcttcatgagacatgcctaataattctttcatcatagcataactttctgcaattaattgcatgtcagcatattcgataccattgtgtaccattttcacatagtgtccagcaccattaggtccaatataagtaacacatgaagcaccgtcttttgcctttgcagcaattgcatcaagaatatctgcaactttgttataagcttcttcttgtccacccggcattaatgacggaccagttaacgctccaatttcaccaccagaaacgcccataccaataaagttgattgcactttgtgctaatgctttattacgtctgatagtatcttgatagtttgtattaccaccatcaattaaaatatctccatcatctaataaaggtaacaaactatcaatcgttgcgtccgtagctttacctgcttgaaccattaataaaattttacgtggtttttctaaagaattaacaaattcttccaatgaatacgttggatgaatatttttcccttttgattcttcaaccattaaatcagttttttcacttgagcggttaaatacagatacactatatccgcgtgattcaatattccaagctaggtttttacccataacggctaaaccaataactccaatttgttgtgtcatattacttacctcacttgttgatttttcattagtattgtatcacaaaatagacatacactacactaaatcatttcgaatgtcgcgcaactattttgattatttctaacacttgacttgcaagcaagttcaatgatttaatcggcattctctcatttgttgtatggattttttcataacccactcctaaaatgactgaaggaataccaaatgtattaataatactgccgtctgaaccgccaccagaaataattgtatttgcagataatcctaaattacgagcactttcttgtgcaattttaacaaccgcttcattatcattaattttaaatcctggataactttgctccactgtaactactgctttcccacctaattctgatgcagtagtttcaaacacatcagtcatatgtttgacttgtgtttttattctttctggatcgtgagaacgtgcctctgcttctaaaatgacttcatctgcaacaatattcgtagctgaaccgccatgaaacttaccaatattggcagtagttatttcatcaacttgtcctaatttcattcgactaattgctttcgccgcaatattaatagcactaacaccctcttttggcgtacttgcatgagccgttttgccaaaaattttagctgaaattaacatttgcgtcggtgcacctacaaccgtagtaccgacatcagcacttgcatcaatagcataaccaaagtccgcgtccaacaactctgaatttaattctttagcaccaattaaacctgattcttctccaacagtaatcacaaattgaatttgtccatgtgggatttgttgttcctttatcacttgcaaaacttcaagcatcgctgataatcctgctttatcatctgcacctagaatagtcgtaccatcagagtatatgtagccgtcatcttttacaattggctttacattaattgcgggtacaacagtatccatatggctcgtcaaatataatttaggtacttcgccttcttcgatagtactattcattgtacacactagattattggcacctaatttaggatgtttagccgcttcatcttctttaacatctaaccctaatgctatgaatttttcttttaaaataggttggattgttgattcattccctgtctcagaatcgatttgtacaagttcaaaaaacgtattaagtaatctttgctcattaatcataatggaaccccttttatcaaaattttcatgtacgccaaacggtaaaaattgatgaaataaaatgttacagtaattgacgttacacagatttatcaggtttgtaaattgtgtcatattattttcaatttattatatataattattgtaactcaaactaagctttgtcaaaaatatattgattgatttttcaaagatatcgtataatgaggaaaatgacataagcaaacttactcatgttttttattatattcctttatgatgattgctagttatatcgtctcaagttaaaagttttatatcttatgtcgtaattattaatacaaaggttattcatttggaggcacacaaaatgcaaaataaagttttaagaattatcattatcgttatgcttgtatcagttgtattagcattgttattaacgagtatcattccaattttataaactatatctcaactacctatacaaaatcatacaattaaaaatccatccattataaacgcatgtattaataagttatcgtattgcaacgattactttcaaacatgggtcatacggatggattattttttaagctacttcactatgcattttcaatgaaccaaattgcgatttgatttgtaaatattcttctaattcatttaatatttgaataatacttgctctcgagttaagcgctttgtgtgttgttggcaatggcagttcatccaatttcaaacgcgtctcatacaaattgtgtaaacgcattgctgtatagtcattactattcacatttagaccaatttctttcagcagtgacgcaacatcatttaaaagcggatctttatgacagatactttcgatgagcggtttcattctcattaacaattccacttgctcttctcgcatatcaaaataatgatagtatgaattttcgtttctaacaaaatgatttttaacatctcggaacgcgatagacttcgcctttttaatatttaaaagtaacacttcaaattcaatcgcaatggtatcttcatatttttcacaaatataactatatttactaaaaatatcagcaatttgttgctcaattttacatttgtattcgtctagttgtttgtctaaacttggcatcattaaattcattgtaaatgcaatgcttagtccaattaacagtaataatgtttcattaacaattaaatgtgcatcaattgattttgcattaaaaacatgaagtaatataacgcaactcgtaatgacaccttcttgtacttttaatacgacagttaatggtataaataacaatacgataataccgagtacaattggactctgacctaataaactaaatattgctgaacctaaaaacaatactaaaaaacatgatactaatcttgaaataatcgcttgtagcgaatgtacttttgtatgtttaatacataatacgactaatatggcgcttgaagcataattatctaaacctaacagcttactaataattacacctaaagtcatacccactgctgtttttattgttctaaatccaatcttgtaaggatttaactttaacatgggttagcgcctcttatctttcttcacaatatttattgaataatgtttgtaattgattaattacgttcatcacatcatgaccttcgatttgatgtctttcaatcatttctgtaatctttccatcttttactaatgcaaatgacggacttgaaggcgcataaccttcgaagtattcacgcgctctttgtgtcgcttctttatcttgtccagcaaatactgtcactagacgatcaggtaatacgtcataatgtaaagcatgtgatgctgctggtcttgcgataccacctgcacaaccacatacagaattgatcataactagtgttgtaccatcttgtttaagaactttgtcaacatcttctgcagtagttaattgctcatatcccgcagattcaatttcattccttgcttgttctacaacaccgttcatgtataaatcgaaattcatgtccataagttcaatcacctatccctttatatttaaactatcctcattctactaattaataacatattgttcaataaactaatctgaatcacacctatatttagacacaattttaacaatataccaaacattattgtgcttaaaatcatggtaactaatttgttcacatgttttcattaatatgtttcaagtatgatgtcttattttgactttactgcaaaaatgcattcaaccatgttgattattgttctttatcttttttgaatatattgcacatattttagtgccaaaaaataatacatccatcgacaagaacaagataaaacaagttgtcgatagatgcatctatgttatcactaatatatatttgtattttctaaagtatactgttcgatacgctgtttaatatgattcataaatttacctgtttgtaaaccatctaaaatacgatgatcaattgaaatacataaattaaccatgttacgaattgcaatcatatcattaattactactggctttttaacgattgattctacttgtaaaatcgctgcttgtggatgatttataatacccattgatgatactgaaccaaatgtaccagtattatttaccgtaaatgtaccgccctgcatatcttcagctgtcaattgcttattacgcgctttcgttgctaaagtattaatttctctagctatacctttgattgacttttcgtctgcatgcttaatcacaggtacgtataatttattttcatcagcaacagcaattgaaatattaatgtctttatgtaagacaatttcatttccttgccagctactatttaataaaggatatgcttttaaagcatctgctacagcttttacaaagaaagcaaagaacgttagattatatccttctttatttttaaagctgtttttataatgatttctcgtattcacaagatttgtagcatctacttcaatcatcatccatgcatgtggaatctctgttacactattaaccatattttgcgcaattgctttacgcacaccatttactggtattgtgctgttttcactattgtcttcagatgattggttacttgatgtatctactgatgttgattttgtttgaacttgtttgtcagattgagctgtggtaccaccattttcaataactgacattatatccttcttagttacacgaccttcaaatccactacctacaacttgtgataaatcaatgtcatgctctgaagcgagtttaaatacaacaggtgaaaagcgaccattattacgtggttgattttgtttagcagtagatgtctgttccactgttgcactagcttttttagtagatttctgagtatgctcatccacttttgcttgtatctcttcagttgtttcatttgtcttttcatcagcagtttcaattttacagataattgtatcaatagctactgtctgccccgcttcaactaaaatttctgtaattgttcctgatatcgtggaagggacttcagctgtcactttatctgtaataacttcacataatggttcatattcatcaatatgatcaccaacagaaactaaccattgttcaatggtgccttcatgaacactctcacctaacttaggcattgttatttccatgactttccctccctagaattctgctaattcacgcattttatttaagattttttctggattcatcataatttcattttctaatacaggagaaaatggcatagatggtacatctggagcagctaaacgcatgattggtgcatctaaatcgaacaagcaatgctctgcaataatcgctgacacttctgacataatactaccttctaaattatcttcagttacaagtaaaactttacctgtatgtttagcacgatcaataattgtttctttatctaatggataaacagttcgtaaatcaacgacttcaacattgataccgtctgcagctaaaatatccgctgcttgtaaacaataattgaccattaatccataacaaaatactgttaaatcttcaccttcacgtttcacatctgcttttcctaaaggtacagtgtaatattcttctggcacttcttcctttaagaaacgataagcttttttatgctcaaagtacaatactggatcatttgattcgatagatgataataaaagccctttagcatcatacggtgtggaaggaataacaattgttaaacctggcgatgaagcaaatatactttcaatactttgtgaatgatatagtcctccgtgaacaccgccaccaaatggtgcacgaatcgttaatgggcattgccaatcattatttgaacgataacgcattttcgcagcttcactaataatttgatttgtcgcaggtaaaataaaatctgcaaattgaatttctgcaattggtcttttacctaccatagctgcaccaatggcagttccaacaatatttgactcagctaatggcgtatcgataactctgtcttcaccatatttttgttgcagtccttgagtagtaccaaatacgccaccttttctaccaacatcttcaccaagaataaacacatctttattttgttgtaatgctaagtcttgtgcctggcgtatcgcctctaaataagataatttagccattagttaagactcccttcttcgtacacaaatgcataggcttcttcgacacttggatatggcgcgtcttcagcagcctttgtcgctttattgatgatgtctttatgctccgcttctatttctgccaaccaagcatcatcgataatgccagctgaaagcaactcttttttgaacttttcattgcagtctgcttttttaagcgtttcacgctcttctttcgtacgatattggtcgtcatcatctgatgaatgagctgtcatacgacttgttactgcttcaatcaaagttgaaccttgaccagaaatagctcgatctcttgcttctttcatcgctttatacattgctaatggatcattaccatctacttgttcaccatgtataccgtaaccaagtgctctatccgataatttttcagctgcgtattgtaatgaatcaggtactgaaattgcatatttattatttataatgacacatacaaaaggaagtttgtgtacacccgcgaagtttaaaccttcatggaagtcaccttggtttgagctaccttcaccaacagttgctgttgcaattttcttcttaccatccatttttaaagctaaagcagcaccaacagcatggggtatttgagttgctaccggtgaactttgagacaaaatattcttagctctactactaaagtgtgatggcatttgttttccaccagagttaacatcgtctttctttccaaacgctgataaaaacgtatcatacgctgagatacccatataagtaacgaaagctagatctctataataaggcgctgtaatatcaccttcttctaatgcgtatgccatcccaatctgagttgcttcttgtccttgaccacttacaacaaatggaattttacctgcacggttcaataaccacagtctttcatctatttttctacctaaatccatccatttatatattacttttaggtcttcttcgctaaggcctaatgatttataatcaatcatgttaaatcctcctatttatacgtgaatagctctactttctgctttcaatcctaattccatcaacacttcagagatggaaggatgtgcgtgtgttgttagtcctaattctaatgccgagccattcatgaactgtaacagtgatgcctcattaatcaattctgttacatgtggaccaatcatattaatacccacaatttcttcagttgattgatcaatcaccatttcgctatacccttcgtttgtgtcatggctatcaatcactgctttaccaattgctttaaatggtactttaaaacttttaactttcattccctctgcctttgcttgttcaatgtttaaaccgatagaagcaatttcaggttgtgaataaatacacttaggcatcatgttatagtttactgggattgggttcccctcaaacatatgatcaacagccacaacaccttcttttgatccaacatgtgccaattgtaattttcctatacaatcaccagctgcataaatatgtttatcttcagtttgttgaaattcgttcgttaaaatatgtcctgatgttgaaagttttattttagtgttgtttaaaccaatatctgatgtgttaggttttctaccaatcgatagcaacactttatctactttaattatgtctgaggaaatttcaaacgtaacaccatcttcgttaacatttatatcattttcagaaagttttattccctcatagaatttaacaccacgtgctgacaatgatttttttaatagttgtgaagcttgtttactttcagttggtaaaattctttcacctgcttctataactgttacgtcaacacctaaatctatcatcaatgatgcaaattccattccgataacaccaccaccaataataccaatacttgatggtaacgtctttaatgataatatatcatcgctagataaaattttatcatgatcaaatgataagaatggcaactctgcaggcgaagaaccagttgcaattaatacaaattggttgggtaataagtctgattcaccatcttcatattcgacagaaattgtgccactttgaggtgaaaatatagatgtacctagaatacgtcccgtgccattataaatgtcaatgtgattgtgttgcattaaatgctttacaccttgatacatttgattaataatgtcttcttttcgtgccaacatattttcaaaattaacattagcatctttgacatcaacgccaaacattgctgcctgttttactgtttgaaatacttcagcagatttaagcagcgatttagtaggaatacaacctttatggagacaagtacctcctaatagttgtcgttctactattgccacttttttacctaattgagacgcacgtatcgcagcaacatatcctgcagtacctccaccgagaacgactaaatcatattgtttctctgacatgttcttactcctaactaatgatatatatccattgaaaatttattaatacatagttttcatgtccattaattacctattttacatgattgtctatttagtttgaatgcacataaataaatccataaatgagtattcaacacactttggaaattatctacgtctttgattgtgttgtatcatttctcttgcattttctcgagttaaatcagtaacacttgcacctgaaatcattcgtgcaatttcatctactttatcatcgctaattaactcttgaacttgtgttgttgtacgatcatcttttgatgatttcgaaattaataaatgatggtcgctcatcgatgcaacttgtggtaagtgagagatacaaataacttgtatatattctgctatatctcgcattttctctgccattttttgtgcagcttgtccagatacacctgagtcaacctcatcgaataaaattgcagtttgacctctcgatttaacaaaaatactttttaacgctaacataattctagaaagttctccacctgacgcaattttatttaaactttttaatggttcccctttatttggactgattaaaaattctacaaattcgattccatcaatattcggttcttctaattttttaaatgaaatctcaagatttgcgtctttcatttgtaagttttgaatttccgatacaatgtggtctcttaactccctagcgactatacgacgctgctttgataacgcttgtccaacctctataacttgattatacaatgcatttatttcttctcgtaactgcgatgtactttgttcatagttttcaattttattgatttcattattaagcttttcttgatatgcgattaattctgaaatatcttttccatatttacgttttaaattattcagcaaattcatacgagattcatactcgtttaacacttgttcgtcgaattctgtattagccatttcatcatataactcatgttttgcatcttctaaaatgtagtaaaattgatcaatatcttcttttaatttgtcatatttgtttggaactatatcgtttattgttaacaaatggttgcttagttcatataaacgatcagtgatagcattttcatccgttaatgtcatatatgcgttattaagcgctaagcttaatttttcagagttttgaatgcgtttaatatctatttcaagttgctctatttcgccttcttttagatgtgcttcagacaattcttctaattggaatttcattaaatctaaacgctgtagcaatgcttggtctgctgattctaaatcttctaactcttgctttttggctttataattttgaaaagtttggtgatatttatccaacaaatcttgataacgtgattctgcgtaattatccaataatgttaaatggtatttttgtttcaacaaagactgcgtttcatgttggccatgaatatctaataattcttgcataacttttcgtaaatcttgtaaagtaactgtttgattattaattttacaaagacttttaccagagctgaaaatttcccgtttaactaataaaaaatcttcatctacatcaatatccatatttttcaatatatgtatagcatctttactctcgtcaatatcaaatataccttcgatgacagcctttttttcaccatgtcttacaaaatcagatgaagctctcattccaattaattgtccaattgcatctataataattgacttacctgaacccgtttcaccacttaaaacagttaaaccatcagaaaattgaatttctaattcttcaataatagcaaattgcttgattgataaggtttgtaacataaactcatcgcatccttataacaaattgaaaattcttgacttgatttcatcacttgcctctttgcttcgacaaataattaaacaagtatcatcaccacaaattgtgcctagtacttcttcccaattgatttggtctaatatagctccaatagattgtgcattaccaggtaatgtttttagaacaagtaaattatcagtaccatctatattaacaaaggaatccattaaataacgtcccaatttttctaaaggatggaattttctatcatttggtaaactataaacatattgacctgaaggtataggtactttaataagttgtagttctttaatatcacgagaaacagttgcttgagtgacatttaaatcataatcgtttaatcgtttaactaattcatcttgtgtctctatctgttcatttgaaataatttctctaatttttatatgcctaaccgattttttgggcacagtaaacacctctgattacgaatatttatacatttattttaacacatgcactgatttacgactactaaacacctttacgtaaaaagggtaaacatggtttatctatcttggttatctatttataaatatttttcatattacgcataacaattgcttaaaatatgtataaaaatgaatatatgtgtaataaacttgctaattattagatttaataagcgtcaattgtttgaacatatttaattaaaatcacattgatatcacagatacgaatattgtcgtatagaaattgaaaattctattttttaaatgaaagtcttcaacataattttaagtttcaacatgagaaaaatcgattaacaaacaacgtcagttgaatatgccttttgagacatttcaaactttacaattgttgctaatcgatatatttgcttttagtgatccctgctataaaataaatcaacgatttctaataagtgttttgtattgaattgttcatcaatttgcgttagttcatccactgctgcgtctctatgataagtcaatttatcttctgcgccatctttccctaataaactcacgtacgtacttttattattttcaagatcgctgcccacttttttacctaactttgcttcatcaccatagcagtctaataaatcatctttaatctggaacatcatacctaaatgataactataactttctaaatgttctttagttgtatcatcgacattagcgatatctgctgcactcataaccgcaaaagttaataatgctcctgtttttgttttgtgtatcatttccaaagtttcaagatcaattggttggccttcgctttgcatatctaacatttgaccgccgaccattccaacatgaccacttgctattgacagccgttgtagaacttttatttttacttcatcagttaatctatcatcacttgaaataagttcaaatgctttagttaataaagcatcacctgctaatatcgcagtccactcaccatatactttatgatttgttaattttcctcgtcgataatcatcattatccatcgctggtaggtcatcatgaataagtgaatatgtatgaatcatttctagtgcaattgcgctcttcatacctaactcatactcggtatttagtgaatctaaagtgagtaataacagaactggtcggatgcgtttacctccagcatttaatgaatacaacatactttcttctagctgagtatccattactgatttatttatcgcaaccgataattcattattgacttcatctattaatttattcatcggtagattcgtcattttttacatcctcagcttcttcttttattaagtcattcacctttttttcggcattttttaaagttgtgtcacaagctgctgatagtttcataccacgttgatataaatctaatgattcctctaaagatactgtttcattatctaatttttgaacaatttgctctaattcttgcatcatttcttcaaaactttgcgtttctttagtcattattacaccttactttcgtaacttttgcatctactaagccatctttcattgttaacgtcaattgatcattttctgttaaatctttagtactcgtaatgacttcgtcttttttattaacaattgcatatccacgcaacattgtattagttggacttaaattgtttaagttttctactttatttttcaaatcatttttataacttaatatcttagaattcaataatttaacaagttggtttgtcaattgaagattattttgttgttcttgattaacactacttagtaatgcttttaaattataacgttgttgcaacagcattaatcgatgtctctgttgttcaaaagttgcctgaatttgttgtttcagtctcttttctaaatcatctcgacgttgtatctgttgatcatacaataaagttggttgtttaaacttgtaatacgatgacaaatgttcaacatgtttacgttgttgttctaaatgtttcttgatgaaacgagtcaatgtaaactgatattgctgtatttgttgcagcaattcatattggtctggtgttgcaataacagcagcttgagttggagtcgcagctctgatgtctgcagcaaaatcacttaatgtaaagtctgtttcatgaccaactgctgatataatcggtgtcttacaattatatattgcacggacgacagcttcttcgttgaaattccataaatcttctatggatccaccgcctcgacctacaataatggtatctacacctaaactatctgcatattcaattttttcaataatgtcgtcttttgctttttcaccttgaaccaaagtactaatttgtatttgttcagctaatggaaaacgactatttatcgttgaatggatatctcgaattgcggcacctgtactcgctgttaaaactgcaatttttttaggaaacttaggtattgatttcttattcgctttatcaaaacaaccttcttcagttaattttttctttaatgcttctaatttttgatataagttccctataccatctaattgcattttatttacataaatttgatagtttccacgacgttcaaaaacagaaacacgtgcttctaataagacttcatctccttctttaggttcgaagtttaatttagaagcactacctttgaacatcatggcacttataacgctttctttatctttcacattaaagtataaatgaccacttgaatgctttttgaaatttgaaagctcacctttaatcaatacagattggagatgtggatcttgatcaaatttatatttaatatatttcgttaaagctgaaacacttaaataatctgacatataacatcactcaattttatttttttatattactcaatacaccatttataaatttataatgatcatcatcactgaattgttttgttaattcaactgcttcattcattacgactttagcaggtgtatcactgtgtaatatttcatatgttgccattcttaaaataatacgatccgtttttaataaacgtgcaatagtccaatcttttaaataaggactaattgtctcgtctaatacaggttcgtgatctttaacgccagaaactagccaatgaataaattcgaagtctaaatctggattatcgtctttaataaagcttatcgcttcatttatcgttaaatcactgtccttcatttctaattgaaataaagtttgaaaagcttgcactcgggattctttacgactcatttttaactccttcaaacgtttgtatttttctttatttaattactgaattaggtatgacattacttttcaataacgatttgtgtaatgtgaatattaatttgcttaggttctatcgctgtcatattagaaattgaattaaaaattgacgtttgaattttgtttgcagtttttgaaatattaacaccatgttttaatgcacaatatacatctatatatatgccatcttctttactctcgatttttaaatcacggcttaaatttttacgactaactttttctaaatttgtttcttttaattcagcaaaatggccagtgatgccttcgacttccgaagtagctatacttgcaataacagatagcacttctggcgctatttctactttacctaattttgaatttgaataatcagttactttgaccatggattgacctcctattaaccttcatcattcataatgctattttgctctaaaaagtttgtattaaatttaccgcttctaaatatatcgttattcaataatttaatatggaatggaatagttgtatcaataccaagaaccacaaattcacttagtgcacgaatgccagccataatcgcttcatctcgtgtcggttcatgtatgattaatttcgctaccatcgaatcataatatggcggtatcgtataattagtataacatgctgactctattcgaacaccatatccacctggtgcaagatattgctcaattttacctggtgatggcataaagttcttgtaaggattttcagcattaattctaaattcaattgcgtgtcctgttaatttaatatcttcttgtttatacggtaacacgtcacccatagcaacttgtaattgtaatttaactaaatcaattcctgttaccatttcagttacaggatgttctacttgaatacgtgtattcatttccataaaataaaatttattatcatttaaatcatatataaactcaattgttcccgcattttcataatttacagctttcgctgcacgaactgcggcatttcccatttcacgacgtgtttcatcatctaaaattggggaaggtgcttcttccactaatttctgcatacgtctttgaattgtacaatcacgttctcctaaatgaattacattaccatagctgtccccaacaatttggatttcaatatggcggaagttttcgatgaatttctccatataaagtccaccattaccaaatgcagtttgagcttcttgttctgtcattcggaagccagtttcaagttctttttcatcacgagcaacacggataccttttccgccaccgccagcagtagctttaatgatgaccggatagccaatttttttggcgattttcttagcttctgagacgtctttcattaaaccgtcactaccaggaacaactggaacattggctttgatcatttctgccttagcaacatctttgatacccattttttggatagattgataacttggtccaatgaacttcaattggcatgcttcgcataattctgcaaaatcagcattttcagctaaaaagccataacccggatgaacgccatcacaacctgtagaagttgcaatagataagatgttcggaatatttaaatatgaatctttagacaaagtgggacctacgcaatatgcttcatcagcaatttgagtatgtagcgcatctttatccccttcagaatagattgcaacagtttggatgcctaaatcacgacaagcgcgaataatcctaactgcgatttcaccgcggtttgcaattaaaacctttttcattatttcaccttaaataacggttggccatactctaccatttgtccgtcttctactaagatttcaacaatttcacctgaaatttctgcttgaatttcattaaatagtttcattgcctctaaaatacacactgttgtttcatttgaaacagtgtccccaacttgcacatatgcttcttcgtctggagatggcgatttgtaaaatgtacctaccataggtgcattaattgttttgtgattatctgaagttggctttggagcttcagttttattgctatcagttgattgtgcttgaggcataggcattgccgcagcttcaactggcatttgtgagatttgtggcgtgataatctcagtttctttttctttcttaagcgtcactttgcctttagtatcttcaatattgatttccgttaaagttgatttatccagaatttcaattaattctttgatttctttaaagttcattattactgactccttcagtttgttttcatctacccgtctattttacttgagacaactcttcaattcaagcatgttcatattgctggcgacattataagtctatcccaaagttataataaaaccacattttaaattaaaaacacttgtgtatttattacttaacattgactcatcttaactcttgattaaaaattttatgcattcagttaaacatatcaatgttatttttattagctattatgttttatcctcaacaatatgatatgtagatatatacctttactcatgtctatgttttttcactaccaattagacgattcgttttatattttaaaaattattttaaaaataaaaagcctcatatcagcatataacctataatcattttaggcaatagctttatgagacttatttagaatatcttacgttaaatcagtatagtgaatacaagctatttgttaacaaattagagattatcctcttgaaatgtagcttccatcaccagtgttgataattaaaacgtcaccttcgtttacaaataaaggtacatttaatgtataaccagtttcaacagttgccgatttagtggcaccagttgcagtatcacctttaataccaggttctgtttcagttactgttaattcaacagttttaggtaattcaacaccgatagtttcaccttcgtatgtttgaatttgtacttccataccttcttttaagtaattcaattcttcttttaagtaatcacttgaaagttctgtttgttcaaagctttcattatccataaatacatgattatctccgtcagcatataaatattgcatgcgacgattttcaatcattgctggttcaactttttcaccagctctaaacgttttctcttgaattgcaccagttcttaaattacgtaattttgaacgaacgaatgctgaacctttaccaggctttacatgttggaagtctataactttccaaatagcgttatcaacagaaattgttaaacctgttttaaaatcattaaccgaaatcattcagtttcctcctcattttacacgcttatgttaaaactataaggtcttttgtgcatttagtaaagacttgacaaccattttctgtaattaaaatatcatcttctattcttataccgcccaaaccttctatataaacaccaggttctactgtaacacagttgttaacttgaagtttatcttgtatcgtacgagccagcattggcccttcatggatttctaaaccaataccatgtcctagtgaatgtccaaattcttttccatacccttttgactctaaatagtttcttgaaatggcatcagcttctgcaccagtcatgccaggtctaatctcattaattgctttcatttgagattcaagtactatttgatatatttctttcagtttaggatctggttctccaatagcaaatgttctagtaatatctgaacaatagccgttataatacgcgccaaaatctaatgtaatcatgtcgcctttttcaataattttatcacttgcaacaccatgtggtaatgcacctctatgaccagatgctacaatcgtatcgaatgatggtccatctgctcctaattctagcattttgctttctaatattgcctttaattctttttcagtcatgcctgcttttacaacagttaaaatatattcatatgtttcatcaacaatattagctgctttttgaattaaagcaatttcgtcagcatctttgacgtctctaattttatctacagtattagaaatgcttattaatgatatacggcttttatttaattcaaggtatgtatcataacttacatgatgcccctcaaaacctacattttcaaaattttcttggtgtagcaattctttaatctcaccaataatagtagatttacgattaataatttcataatttggcgcctgcttagttgcttgatcaatatatctaaagtctgttatcaaatattgtttatctttagatatgataagtgctccactggtaccagtaaaacctgataaatatcttctattgtaatccgaaagaatgataatcgcatctaaatgtttttgttctaaaatacgatgcacttgtgttattctgctcatcttattacctcctagtgaaacgtttgtgcatttcaactttatacattaaaataatatcataataaggataaaaaataatagatattgattttagggagatagtaatgaaaaaattggtttcaattgttggcgcaacattattgttagctggatgtggatcacaaaatttagcaccattagaagaaaaaacaacagatttaagagaagataatcatcaactcaaactagatattcaagaacttaatcaacaaattagtgattctaaatctaaaattaaagggcttgaaaaggataaagaaaacagtaaaaaaactgcatctaataatacgaaaattaaattgatgaatgttacatcaacatactacgacaaagttgctaaagctttgaaatcctataacgatattgagaaagatgtaagtaaaaacaaaggcgataagaatgttcaatcgaaattaaatcaaatttctaatgatattcaaagtgctcacacttcatacaaagatgctatcgatggtttatcacttagtgatgatgataaaaaaacgtctaaaaatatcgataaattaaactctgatttgaatcatgcatttgatgatattaaaaatggctatcaaaataaagataaaaaacaacttacaaaaggacaacaagcgttgtcaaaattaaacttaaatgcaaaatcatgataggagtcttttaatgcgtaatataatattttatcttgtacttattattgctgcgattggattagtaatgaatctagatgcctttattttttcaatcgtcagaatgttaatcagctttgctgtaatagctggtattatttatctgatttattatttcttcatcttaactgaagaccaacgcaaatatcgcaaagcaatgcgtaagtataaaagaaatcaaagaagaaaatagataaaaaaacggaagcacttgtaggtaaaatagtctacgtgcttccattttttattctaaaaactactttctaaacatccattcatctgaacgatatttttcagttaattcttccacttctgccaattgagcttctgttaattcaagtggctttaattctatatttaaacctttcttaaaacctttctcgaaagcttcttccatttgactaatagtaatgtgttcatctgaaatatcattgatggcaactgctttttcaacgaatgcctctttcatttttaattttaatctttcatttttataaataaacatatcaaacagttcatcaatatcaatatcttgtaaaatcgaaccgtgttggaggattacgcccttttgtctcgtttgagcactcccagcaatcttacggccttcaacaactagctcataccaacttggtgcatcaaaacacactgaacttcgaggttgttttaatttttgacgctcttcaggcgttttaggtaccgcaaaataagtatcaaatcctaagtttttaaatccttctaataatccttgtgaaatcactctgtacgcttctgtaactgtagaaggcatattcggatgcgattcaggcacaatcacactgtaagttaactctttatcatgtagcaccccacggccaccagtttgacgccttacgagaccaaaacctttctctttaaccttatcaatatcaatttctttttgtagcctttggaaataccctattgataatgttgcaggattccatgtgtaaaaacgtataactggatcaatttcacctctagagacaaaatttaataacgcttcatccattgccatattataatatgggtctttacttcctgtattaataaaattccaagtttcagtcatattcaagaactcctatcagcaaaatgtataatatttgattcgctaattaatcaatttaactaaatgaataataattgcaattctttagtgaaatattttgataatttgacctaacagtcttataattatattatcgtttaattagggaggatgcaagatgagtgctagtttgtacatcgcaataattttagttatagcaattattgcttatatgattgttcaacaaattcttaacaagcgagctgttaaagaattagatcaaaatgaattccataatgggattagaaaagctcaagtcatcgatgttagagagaaagttgactatgactacggtcacattaatgggtctcgcaatattcctatgacaatgttcaggcaacgattccaaggattaagaaaagatcaaccggtatacttatgtgatgccaatgggattgctagctatagagccgctcgtattttgaaaaagaatggatatacagatatctatatgttaaaaggcggctataaaaaatggactggaaaaataaagtctaaaaaatagtttttgtaaatttaatatacgatttaataaaatctgagtgttaattgatcatcaataacaatactcagattttaattttttaacaaagtctgttactatatttctctagcttcactgatcattaaacttagtttcagcataataaagaaagttcagctcattttcaatacgattcaattaccgcaatctaaaaaatgaaaagacaatttctatgaaagaataataccaaaccctaagagttattacttcggtttagttttcttgtttaaatagaaattgtctttttcaattgattttgaaaccattatccttaaatcttcatacaaagttagaataataattctcggaatatgtgtttaatactttatttttcctgtttaagattttcaaactttaatattggtttacgagcagctgtagcttcgtctaatcgatcaatcacagttgtatgtggtgcttctagcactttatcaggatcatttttagcttcttcagcaatactaattaatgtatcgataaaataatcaagtgtttctttagactctgtctcagtcggttcaatcatcataccttcttcaacatttaatgggaagtatattgttggtggatgtacaccgaaatctaataatcgcttagccatgtctaaagtacgtacaccaaattctttttgacgcacaccacttaacacaaactcgtgtttacaatattgtttataaggtatttcaaagtgtttagataaacgtgctttaatataattcgcattaagaaccgctgcttcagaaacctctttaagtccagttgctcccatagttcgaatatacgtataagctcttaagtaaataccaaagttaccataaaatggttttacacgtccgatagaatttttaatgtcattatcatatttaaatttgtcgccatctttaataaccattggctttggtaagtaacttgctagttcttttactacaccgactggacctgaaccaggaccgccaccaccatgtggaccagtaaatgttttatgcaagtttaaatgaacagcatcaaatcccatatctcctgggcgaactttgtccataatagcgtttaaattcgcaccatcataatataatagaccaccagcattatggacgatttcacggatttccataatatttttttcgaaaatacctaaagtgtttggattagttaacataatagctgctgtattttcatttacaacacgtttcaagtcatcaatatcaacttcgccacgttcgtttgattttacagtaactgatttaaatcctgcaaatgaagctgaggctggattcgtaccatgcgcagaatctggcacaatgacttcatcacgatgaccttcaccattattctcatggtaagctttaaatatcatcaatgcagtccattcaccatgtgcgccagcagctggttgtaatgtcacctcatccataccagtaatttcttttaattcttcttgcaaactataaataatttctaatgaaccttgaacttgatcttcatcttgtaatggatgtgattcactaaatcctggtattctagcaaccttttcattaattttagggttatacttcatcgtacatgaacccaatggataaaatccgttgtctacaccgaaatttttatttgaaagttcagtataatgacgtactaagtctagttcagcaacttcaggaaactccgctttgtttttacgaataaatttatcatctaacaatgactcaacagaatttgttttaatatcactttttggtaatgaatatgcatatctgccttcacgagatctttcaaaaattaatggacttgatttactagtcatttaactcaccagccttttctacaaatgtatcgatttcatcttttgttcttaattcagttacagctattaacatgtgatttttaaagtcgtctgaaacaacacctaaatcaaaaccaccgataatattgtacttcactaattcctcgttaacttgttgaattggtttgtcaaatttgactacaaactcattgaaagatgtaccatctaatacttcaaaaccttttttaataaattgttgtttagcatagttagcatgttctatattttgaactgcaatatcatagataccttgtttaccaagtgctgacattgcaattgatgacgctaaagcatttaatgcttggttagaacaaatattagatgtcgctttatcgcgtcgaatatgttgttcacgtgcttgtaatgttaatacaaagccacgattaccttcatcatcttgtgtttgaccgactaatctacctggcactttacgcattaactttttcgtcgttgcaaaatatccacaatgtggcccaccgaattgagcaggaattccgaatggctgagtatcacctacaacaatatctgcaccaaatgaacctggaggtgtaagtaatcccaatgctaatggatttgcatatacgataaataatgcttttttatcttcaataaagctatgaatcttttcaagatcttcaattgaaccgtaaaagtttggatattgtactgcaacagctgctgtttcatcatccactgctgcttctaattttttcaaatctgtaacagtgccatctaaatcgatttccactacttcgaattccttacgcgtcttagcataagtatgaagtacttgtaatgcttgataatgtaaaccttttgagactacaattttatttttctttgtttgactaaatgctaagatacatgcttcagcaaagctagtcatcccatcatacatagaagaatttgctacatccatatctgttaattcacaaattaaagtttggaactcaaaaatggcttgtaattcaccttgagaaatttccggttgatatggcgtatatgctgtgtaaaattctgatcttgaaatcatagcatccacaactgatggcgcgtaatgatcataaacaccagcacccaaaaatgatgtatgcgtttctttagtgatattcttgcttgcaatgcgatttaatcttctaagtaacgttgtttccgcttcgccttcagcaatatttaaatctctatttaataaaatgtcacttggtacatcaccgaataattctcctatagattttgcaccaattgtttgtaacatttcttgcttgtctttttcagttaaaggtatataacgatgactcacaatgcacacccctttttaattatttatcaatttgatttttcttaacaattttcgcttttaattgacgcttacgaacttgaacaagcaactctctacccatttcaaactcatctctttttatcattgcaagtgcaattgattttcctgatgatggagactgtgttcctgaagttacttctccaataatatttccatctaaatccataacttcataaccagttcttgcaattcctttttcaagtaattctaatcccactgttcttcttggtgcaccattttctttttgatcttttaatacagatttaccaataaaatcagcatcaattaatggtttacttgcaaaagcgataccaccttcatatggtgtaattgattcagttaaatcttgtccatgtaatggcaatccagcctctaatcttaatgtatcacgagcgcctaacccacatggcataacattatactctaataaaccatcccaaattttttcagtatcatcgatattacaataaatttcaaacccatcttcacctgtgtaacctgactgagataaaatgacgtttgctccaaataatttgacaccctgtttaaattcaaacattttcatttcagttacatcttcatcaactaattgattaattaaatctctagcttttggtccttgtattgctaattgaccatattggtttgatacattttgtacttcaacatcaaatttctctttgtgttttaaaatccaattaaaatctttttcagtattagcagcattaacaactaataaataattgtcgtcagctaatttatatattactaaatcatcaataataccgccttcttcattacataaagcagtatataatgcttttgaagtagttaaattatcagtatcatttgataataaatattgcacaaactgactagcatctttacctgttacttcaatttcacccatatgactaacatcaaacaggccaatttcgtatcgaacagcattatgctcctctttaatacttgaaaattgaacaggcatcgcccatcctccgaattccacaatttttgcacctctatcaacataattttgatataaaggtgtttgttttaaatcacttgacattgaaatacccccttaaaattataaaaacaggatagcaatcgctaccctgtttataaatcaccaattcaggaacgcgttacagtattatccttttgcctgagagtttcgtaataaattacttgcaccttcggcgatagagtcttaacgctctattctctctaatactgatcactcgcttttattaaatttagcaattcataatatatttctgaaattgatagcaaatgactatcaaatttcttgaatgcgatttcattatatcttaaattccgcgagcaatacaagtcatttaactgcttgattgtcttattatttgcattaggtcgatgtgggtcatcattgattcgactatatataatatcaatattacaatctaaccaaataatgtttttttgatttttcaaaaaattaaatgcctcttcactctcaataataccaccaccagtagcaattatatctgcagtgttaatacattcttgcaaacatgtgaactctaaattcctgaaatattgttcaccatgtttacaaaatatttctggtattgttaacttatacttctcttcgatatatgaatctatatcaataaatgataaattttgctcatctgcaacgtatttaccaatcgtagatttaccggtacccatgaaaccaattaaaattattggtgatttatcatgattcatgcgttttcccttctttcaataacaaaacaatcttatagttatagtcagtttcaatattatataatgtctttaattttaaactatattgactgatataaaaagtgaaaatggaaaaataaattgctgttagcatcaataagaacggcgtaacatatcctttttctttatataaatcaaaattaataaattatttcacatcctttttaatagtactcatttaaatactagtaagttatacataaatagttttagtctgcacatttgtaccgactttaactgttatcgttattttaataatggatttatagtagatatttgcagtaaatgctgtaacattattaatcattgttatatttcctctgtcatttacaactttaataattttattattaattaatttgtattcgatcatttcttcacctttatgtaaaatgatacggtgttgcctaatttcaatatcgtttctatctactcctttaaaatcatctagaatatctcttgagaaaaattcgaaatctacagttgttaaatccctactttcaattagaaaagttttactaagtctaattaagtctggaacaattagtaaagttatacttataaccatcatcgctactaacatttcaatgagcgaaaaagctttgacattaatactgtatacatgtcttttgataagaagtggtattttttgaaatagcacaaatttgttggtcactttgcttaatatcatacttccctatagttacccccttcttaagttcttctttattaattttagatacagtcgtcaaaattactttagaagcatcaattgtttgtagtttatggtttatactcgcttgcatttgattcatcattggtatcaatagtaatgtaatcaatccaattagcaaaaatccagccatactatctattaagaatgaacctttacacttatagcttttcataacgaattcttcctttttcaatatggaatattattctataaattgaattgttattgtaaattgttatgctaccaaatttattgatattcccttttttatcaaaggcaataatatcaacttttgcaacattaattattttgcctacttttaattttagaaatcgtattttattattctctattactttaatagtgtcactgttttcataaaatctaacattgatatatccttgatttgctatagcttgcgacttaatataattcaattcagtaataaaagaaatgatatttgcctcatcatctattactctaagattgcttaatcctttagatgtcattgtcaaaagtagaaatatactgattaacatcattaccacaagcatctcaatcatagtaaatgctgactgctttctaatttgcaactgcttctccattactaattgtgattgtctctcctgatttacatgtcttttgtgcttcttttataaaaccatctgcaattaagtcttcaatagacgatggatttctattatgtttcaatgcatacgcttcaatttgactattaaccatttttacctgtgcattacaacctgttgattgtatgtgagcagtttgtttagcaatatttggaatgattaaaattaataataaactgatgattaataacactaatagcatctctatcaatgtaaacgcttgagttttcttaagaaatttaaacatatattaacctccattattttatactttgcatcatttgaaacattggtaacataattactaaataaattgcgacaataaataaacctaaaatcaaaaataaaataggctgtaaaaactgagtctgttttatcgctttatcttctatttgttttactaatatttgcgaatataactttagttctacttctagcttccctctcttttcaccttgtagcacaaacttaattaattgaggcttaaagcattttagtttttctaaaatttgaggcaaaccatatcccatttctgaataagttaataagtatttacctagaaactgtctaaatggatcactactatggttaatataaacgtctactattgattgaagtgtaataccatttttataaaacaacactaattcattagttacaaaataagttttaaataattggaaatagcctgatattagcggtagtttcatcacaaagtttatcttattgagcatatttaaattgttataaattaatttcataataatagccaacatagatactattatgagcattactacaattatagtaggtaagctggtaatgaaaaaagacaatgttttttgaaaagaagatagttgaatattcatagaagtatataattgttgaaactgtggaattactgtgaggtttaatataataatcatagcaataaagatagaaactagtattaaggggtattgcagtgtctttaacaatcgttgttctgactttctattcactttcatataatttacggtttcttctagaacgtctataatattgccaaatctttctgccaaatatacttgcatgacgatagtatcgctataacctatcagtgataatatttgattgcatggtgcaccatttgaaatttcacttagaatggtggtacctaattgcttatttttatatgtcatttgaagatttaaaaattaaaaactttgatacagagtgaaaccatatttcaacaaattacataaatttgaaagtaagtcgatttgttgggccttacttaattgtcgcttcttagaatgtagtttaaatgtatttatgcattgtagtttcacaaatgacacctgcttttgtcatatcatcaagtttatcttctaagttcttaaatgatgatggtaatgaatgattatgggaaaagaaatatcggagttgttgctgagatagaatttcacatactaattgtcgctgttgcttaatagtagttacaagtcgttggtttataattaagttagttgcctgtatcaattcttgtacagaaatgcccatttctaatagccttaaaatagcacctttacaatcagttgcatgcaatgtagtcagaacaaggtgaccacttaaactagcctgtataacacacttggcaacatctttatctctgatttcacctattaaaataacatcaggatcacatcttaaaatagctttaaacgaatttacatagtttatgccagctttatcattcacattaatttggacgataccaggaatttgcatctctacaggatcctctatagaaattacatttaaattcaaggctttattcgcgtatgagaccatttgatacattaatgtactctttcctgaaccagttggtccactaaacaatagtaatccttgtttcttattcatgaggtgtttaaaatcattgaatttataagttgatttctgtggttgaaaaaattgaggtacaattctgataacacaactttcttggccaagtgacaatggtaaagttgatattctcaaaaaatatattttattgaaaaggtaactatatcgaccgctctgtgcgacttgctgtgtagaaacatcaagcccagcttgaaacttcatataaactaataacttttgataaatgctattcccaatttgttcatactgctccaagttatcattaattctaaatttaatacttacttcatttttaactggaataaaatgtacatcactcgctttcatttctatcgctttattaattatttcttgaaatagaatcttcaaaaaaacacctcctacatataatcacgtaggaggtgtttttattacttcaatttaaccgtgtaaaaatggatttaattgttcatcatcaaccgtcgtatatggaccatgtccagggaataaaggtaaatcgccttctaattcaaatattttatcttgaatagaatcaactagcgtttcataatcacctttatataaatctgtacgtccgattccattattaaataatgtatctccaacaactgcgaattcatcgaacacatatgttaaacttcctggtgaatgtccaggtgtgtgtaacacattaaacttaaatccttctatttctgtgctaccttcgtttaacttttcaggagttaccttacttgtaataattggtaatccatattgcttaaatttatctgccccatttttaacgggatcttttagaaaatcaaactctgcttcatgcatataaaccgggacatcgaatcgatcaactatatcatcgactgctccgatatgatcaaagtgtgcatgtgttaataaaatagcttttaacggtttatttatttggtttaattttttaataattttttcactttcacctgaagggtcaatcagaataacagctttgtcattttcgatgaaatacgtattagtatcaactaagcctaaagttaagcttgaaatcctcataggttttcaccactattttctaaatgtttttgtactgatgttagtttatcattcatttttctagatttgtctcgtcggtcatcaatacggatatttgtacaaactctacttaaacctttatcaaaaggtaattcatgtatcacttgcacaacttctaatacatcgcttaattcaccttcaattagagtattcattggtgttaattgaaaatcaattttacccattgctttatattcttgaagttttttctgaatatctgcaatatatttactaacactcggaccttccgttccaactggaataacaaccacatcaacaatagccattattttaccccctctttatctaatacataggtcttgattaatcctgctgctcctgtaatacctgcatcattacctaatttcgcttgtacaatttcagtttcaaattgagcaggtgcaaatgttaaattatgatattctgttttaatattttcaattaaaataggtcctgcagtagacattcctccacctagaacgatatatttcggattacttgtaacactaataatactacataaatatccaatatagtttgcaaccttttcagtaatgaaaatacagaattggtcaccagcttttgccgcatcaaaaacagcttttgctgtaaccttattttctttaatcaattctaatatagaagatctaaacgtcaacttcggatagtagaagttaactaagttaacaacgcctgtcgctgaagcaactgtttcaatacatccagaacgaccacaattacatttaaatcgttgatcgaagtctgctctaaaatgacctatttctgcgccagagccattatgaccatgtacgatttcaccatttgaaataattcctccacctagacctgtaccaagtgtgatggcaacaacatcatcggcaccttcaccagcacctttgtgtttctcccctaaagcagctatgttagcatcattatctacatacactggacaatcaacgaattgttcaaaaatctcacgtacattaactttttctggccaatataagtttactgctccatttactgtacctttttcaaagtcaacaggacctggtacaccaatacctacgccaagtacatttgaaaaattataattattttcatttactttttcaacaaacgaatcataaattcctttcaaaagtgtatatcctgtactatcagatgtatcagtgtgaatagaccatttatgtaattgttctaattcaggtgtgaaaatacctaatttacaagtcgtcccgcctacatcagctgctaaaataatttttgtcatttctgttcattccttctctgattaattatcaacgtacatttcaaatattcttccttagataacagttcatattgatacaatgatgaaatctcctgttgaatcatttcgtacatatcttctggatttttaaaatatattagaaatccgtaacttttcaataactgttgtacatcataaaagttatttatttttcgactcatttgatttagtcaactctttttctaagttaatataatctgtatttttagggtctgcatttaatgctttacgcacatattttaatgctttttcatcatcatttaatgaacgatttgctatcgctaactcaaaatttaataaacctgatttaggaaacattctaagtcctcgctcccattctgtcataccttcggacttagaattgatagtagccataatcataccacttaaataatatgtttgatcatcggcataatttttatttattgtctgcttcgcaatattttgagcattatcataattaccactagtcatatcatctttgatcaatttattataaatattatcttctttaattgtaaaaattctaatttgaagtgcaataaatataacaagcataccaattagtaaaatccaaaaaatattacgattcacttaatagtaatagccaattaaagttattaataaaccaccaatgaatcctccaatatgcgccacaatatttatatttgacataaacagagaaacaccaactaatatcactaatgcaattaataactgtcctaacatttttttgttaaatgtttttgaaacatacatcatcgcaaaaattgatccaatcagaccaaatatagcaccactagccccaactgaaattgtagtcgtattaaatgatagtgatacaaagtttccaaacaaccctgcaataaagtatacagttaacatccgccatgaaccaataattgcttcgactattttaccaaaaataaataatgaaagcatattcataagtatatgttcaaaactaaaatgtaaaaacatcgatgtaacaattcgataccattcaccatgtacgacattaaaatgcactaacccgccaacatctaataattttacatccgaaaaattatttaaatataaaatcatacataaccatattaagacatttacaaatattattgtgtatgttgccggtgaaaatttctgcatatatttatctaaaaagttatcggttaatactttgcgtttatagaacatatatgtctttttatcattatcttctgaaataagtctagccaaaaatatattcggcatatgctttatcaaatcttttgtgtgtcttataacattgaatttaattctaattggcgaaacttcatttaattgttcttctgaaaattccgattctgtaaaataataaaattcaaaactttgtggttcgaaagaaataaaatttgctatttcatctttgtgttcaagcactttcgctttgtcaaaacgtatttcttgggtagacttgatatgttgtttaaaaatgactacttgtttttttcttttatgggctaaccaaatttcttggtcatctttttccctactgacaatatcaaaattcaagtacctaatccaataatatattgttttccaaaattgtttgtctatgttcatttagtcctccactatgctgcttgatatataatcaatttatcgactggttgatcgaatgattccggttcaaatgatgttatttgaaaatcgtataataagcttattgtctttgtctgataattagctaaaaacctgtcgtaatagccaccaccatacccaattctatatccatcgtcttgaaatccaacaccaggaacaacaattaaatctaggttattcgttgtttcaccttttgaagttggatagtaaatccccttattatcgacatcaatatctttgagattaaatatctctttaaaagtcatttgatgatttaaataatccattttcggtacaaaaatacgtttatgatccattaaggcttgttcaataatagaaaaagtatctacttcatgattaaaagaaagaactagcgcaattgcgtttgcttctttgtattcttcagttgcaaaaaattgatttcttaaccatgtgtctgcttttcgcttttcagctttattaaaattcttcattttatgtaaaatgtattttctaatctcatttttagtcacattatcacccactttattcaattctattatatcgttaataacaatacatgtcattatgttgtcatgatgaattatgcgacaattctaaaatttattatttcaattgaaaatcttttatcatttcatacgtgtgcataattaaaaaggtgaaacctcttattttgagatttcaccttttttattgttaatttaaatttaattttaatgattattttgtttcacggtgtaaagtttgtttgttttcacgtgaacagaatttcttcatttcaacacgttctggattatttcttttgttcttagttgtaatgtagtttctgtcaccacattccgtacaagctaaagttacgtttacgcgcatggttattcctccttatcatttctaaatacgactttattattataccaacatctataatatttgcaaagttaaaattttacaaccatgcgctacacaatcgtcaggttaaattttatttgtctttgtctttatttttatcatctttacctaactgcttaaagtagtagttaattacatctctacctaagtctccacctgttaaccatggtggtggtacaggctgatttgtatatacaattgaaaacgctaattttggatcatcaattggcgcgtatcctatataagtagagttaactcttggctctccgttttggaacacttctgcggtacccgttttaccagcagtaggtactactgtatctttaaaactaacatatccagtaccatctttatcattaaatgccattttgaatccttcttgaatttgtttgatttccttttcagtattattaaccttgttcaagacagtgccattaattttcttcttgagtggaccaacctcatctttattagttgattcatgaatcgttaatccaatgtgtggctgtattctataaccatcattcgctatagttgaaacatattgtgataattgtaatggtgtataggtatcatattgaccaattgataaatctagataattacctggattatttgttaatggttcgatttgacctcttgtttcatttggtaaatctatccctgttttcacacctaagcctacttgatttaatcctcttcttagcttttgggcaggtgaacttatgtctgaaggtaaagccataccagaataataagggtctcccgctaattttaatgctgttttaaacatatatacgtttgatgaatgcatcaaagcttgcttatcattaatagttacatgcccgtttttattgaagtatgatcgttttgtcaaaccaccttggaaatgtaatggttcatcgaccattgtttctccaactttgatagctttattctgataaccggctaataatgttccaccttttacagaagatccaaccgcaaattgagaagtaaacgtaccaatgtcataatcagtcattttaccactcttattaatctgctttccggcaagcgcaagaatgtctccatttttaggattttgtacaaccatcattgcattatccatatctttggcaccttgactgcgaagcttcttaatttgtttatctaataatgcttctacttctttttgaagatctatatcgatcgttaatttcaaatcttgaccgcgagcgccaggatttaacacttctgaagatgtaactttaccagatttgtccgttgtgtatttcatttctttcttcttaccacgcaatacatcttcatattgatattctaggtaagattttccaacacgatcattgcgtgaatatcctttggataagtaatgttctgtcaattcttttggaataccttcagcaggtgtcgatacatctccgaatatacctcttaaagtatcgccatatggatattttctatcccaatccatagacgtgttaacacctggtaatttggaaagttgctgagaaactgctgcatactctttttcactgacatcttcattttttatcatttgtggatctaaaactgttcctgcattcatctctcgaaaaatagctaaaacttgtaaatctttagaagacaattcatctaattgtgattttccgattttcgataacagttgtttatcatattgatcttgtttaatacttccatctgctaacatagcttgttcttttgtcatcattgcttttgcttttttaggatgcaactgaatccagaaatctttcttatcacgttctgtaattttcttagtatccatcttgattagctttgataacttttcagccgtatccaacatttccgattgtgttgtttttcgacccctagtatatgtaatagccattttagaagcattatcaactaaaactttcccatttctgtctaaaatacgacctcttggcacagactcattcactgtaatgttttcatcattttttataatttgtttataatgtgagccttgtgcgatttgtaaataacctaaacgtagtactagtactgcaaaaataaatacaatcacaccaaatataaagttaattctcttgttaattgtattttgaacgatttcatcatttgatttttcttttagtctttttaacaaaactacctacctctattcaaagtctttcactttaaatcatatatgaatttagaaattatttctatctttttgacaaaaaaataacggtctcatttaagagaccgaacaagtaatcatactttattttgttgcattatataattcgtcaactttttcccagttaactacattccaaaatgcgccaatgtagtcagggcgtttgttttgatattttaggtaataagcgtgttcccatacgtctaaacctaaaataggtgttttaccctcagttaatggattatcttggtttggtgtagtcacaatttctaactggccattgtttacgactaaccaagcccaacctgaaccaaagcgtgcagctgctttgtcagcaaattcttttttaaattcttctaaagaaccccattgttctttaattttttctactacagtacctttttcttctgagtttggtgaaagtaactcccagaataatgaatggtttaaatgtccaccgccattattacgtacagcagtttggatgttagctggtacactgtctaaattagcaacaatttcttcaatagatttagattctaaatctgtaccttctactgcagcatttaatttcgtaacatacgtgttatgatgtctgtcatggtgaatttccatagtttctttgtcaaaatgtggttctaatgcatcaaatgcgtatggtaattttggtaattcaaaagccataaataatcatcctcctaaaatgtctgtaagtaaataataacaagcagtgactggttcaacaaagaatttgcttaaattctactacttattattttctctactcatttaatataactcaaatcaaaaataattaaacattttgtatataaaaagttaacagatttgccataaaatcatacgaacggagtatgaaatgaacctttatcttctataatttaaaaaatgagatttatgcatacatcggaccaaatgtgcataaatctcatttctttatattaatcttggcaagactcacatacaccataaacttcaagtttgtgtttgtgaatattaacaccaggtagtgataattttatctgatctattggacaataatctattacctttgtatctccacacttttcacagataaaatgatgatgatgatggtttgtacaagcgattctaaacttcatttcaccatcaagttctgtattttcaataattcctaaatctttaaataagtgcaggtttctatatattgtgtcgaatgaaattccaggataattttcatccataacttgttgtatatactttgcgtttatatacttatcttcttcgacaaaaatatctaacatatctttacgtttatctgtatattttaaaccgttctcttttaaaattttaatagcatcatttgtattcattgatattagctccctttttaaacttcattcgcattttctgataagccattgtaatcataagtaaaataacaagtagaactacaattacaccacccggagaaatgtccatatagaaagctaggactaagcctaatattactgataattcacctaaaaatacacttagtaatatcaattgcttaaaactttttgttattcgcatacttattgcaattggtaacgtgattaacgcacttactaacagtatccctacaacacgcattgaggcagaaataaccatcgctacaataacaataaataaaaattgaatccatttaggaatgccaatgactttactatattcctcatcaaatgacaatataaataattctttataaaacaatgtaataaacagaacaactatgatggcaatgacaataatcgttgttaaatcacttatattcactgcgcttattgagccaaatagcaatccaacaatttcttgattgaacccatcagctaatgaaatgaagattgcactcaaggcgataccagcactcattataattggaatagcaatttcttggtaagcagtgtatgacgttcttaatttttcaattagaagcgcacctactattgcgaataagattccaaaccacattggattaataaatactagtgttggcataatagtaagtaaaaacataccgaaagatataccacctaaagttacatgacttagagcatcagctataagtgatagtcgtctaacaacgataaaagcaccgattagaggcgcaataaaacctatcaagataccactaattaaagagtacctcataaaatcaaaattcaataatgcatctatcaattgtgacacgcctttccattttaaataaactcaaatctttattaattacaacattctcgattatgctgatgatcgacaaaacgtacaggatgtccataaatttttgaaatttcaacttcatcaagtgatttaaactcatcagttgtaccatggaaatgcaaatgcttatttaaacatgctacttcagtagcagtatctgctacaacaccgatatcatgagtaactaagataatggtgataccttcttgttttaattgatctaaagtattataaaattcacttacatgttttgcatcaataccattcgttggttcatcaagtactaatactgcaggttctgaaatcaatgctcgagcaatcattacacgttgttgttgaccacctgataattctgctatatttttatgaattaaatcacttatattcagtctttctagtactttaatcactttttcattatctttgctattaaatgtttggaaaagacgttttgtctttgttaatccgcttaaaacaacttctttaacacttgctgggaaacctgaattaaaggcatttgctttttgtgatacatagcttaatttaattgatgttttcttatttttaaaatcaataccttcaacaaaaatctcaccactttgtaaaggtaataaccctagaatcaacttcaataatgttgatttaccagcaccatttggtccaacaattgctaaaaattcacctttatttattttaatgtttatattttctaacacttttttatgatcatagtagtaattgacatttttcaattcaaagactggtgtcatcgtattctcacctcgcattcaactatacaactcctagtaacatatgtaaacagtaatgtttacgactcaaaattagacaaaataaagagatatgcccccttcaagttttatttatcgcatttcttgaagagagcattatcattttattgttgcataaccttattttttaattctgggtcaaattgctgttgttttaacatttcaatttcaagtttatatggcggttttttatttttcttatcttcaccaacataaggtgtttctaagattttcggaatatctttaaaactatcatgatgcacaatgtaatttaatgcatcaaaaccaatgtaaccgaagccaatattttcatgtcggtctttttgagcgccacggtcatttttagaatcattgacatgaacaactttgattctgtcgactccaatgattttatcaaattcatttaatacgccatcaaagtcctctttaacattatatccagcatcatgcgtatgacatgtatcaaaacatactgataaacgttcgttattatgaactccatcaataatacgtgctaactcttcaaatgagcgaccaatctctgtacctttacctgccatcgtttcaagcgcaatacgtacattattgtcattcgttaaaacttcatttaatccttcaataatcttattaattccggcatcaacaccagctccaacatgcgcacctggatgtaatacaatatctttagcccctatagcttgcgttctttcaatttcttgttgcaagaaatctacaccaagattaaacgtttctggtttggttgtatttgcaatattaatgatgtatggtgcatgaacaacaatattagataaaccatatttttccatcacttcatgacctttagttatatttaaatcttcaatacttttacggcgcgtgttttgaggtgcaccagtataaatcataaatgttgtttcaccatattcatgcgcttctatagcagaaccttctaacatctttttaccactcattgaaacatgtgatcctaataacataaaacacacctaaccttttttgttttgcttacgtttttgtctattttgctgcttactaaattgcttacgctcttgacgtttcattttttcaacttcttgtttaaatttcttcttataacctggtttaactttgtttttaattttacttcgaactttgttcttcacttgattagttaaatggtcatctttgcgcattcttgcttgacgctgattgtgcgctttaacttcttttaactcaccatctttaatatcaacagtattgaatacaaaaccgcgatcttctattaatgaaatattgtgttcttcatcaggactataaagcgtaattgctacacctttataattcccacgaccagttcgtccgactctatgcgtaaagaagtcaatatcatttggcacatcaaaattgatgacatgactaacaccttcaatatcaataccacgagatgctaaatcgctggcaataacgtattggaattctaaattacgtatacgtttcatttgttgtttacgttcacgtggcgttaagccaccatgaatcataccaactttaataccagcttcatttagtgaacgtgctaaatcatttgcattatctctactattacagaaaataatacataagtatggatttagtatatcaattaaatttaaagtcttttcaactttagctgcacctttagtaggtattaaatagaattcgatgttctttttattttgttttttactgtcgacagctacatattctggatgacttaaatatttatttaaaaatggttgtaactgttgtgggattgtagcactaaacaccgcaatatttgcattatcttccaatcttgcagcaatgtaatctacatcttcaattaatcctaagtcaatcataagatccgcttcatcaataactaaatatgatgctaagtgcacatgtaaatgtcccgttttagctaagtcattaattctagtaggggtgcctataatcaattgtggttgtgcattacaacgttgtctatctttctctatatctgtaccaccaataaaaactttaactgaaacaccagctttaaattggcttaaatggttcgctgcatcgtatagttgttgtgcaagttctcttgttggtgcaactacgattgcttgtggttcttttatttcactatcaattaactgcattaatggtaataaaaatgcatgagatttccctgtacccgtttgagattgaccaattaaatttgttctctttagtattcttggaataattcgattctgaatttcagttggtttttcaaaattaaggtctttcacagcgtcaattaaactagattctagattaaattgttcgaatggatgttttgccatgatttggcctccttatatgttcatctttactattataaagtataaatgtgctattttaaataaaaatattaaaacctcgaaatttcaaaatttagaaatcccgagattttagtttaaatatattgaaatggatctgtattaattgtagatgcttcaacatctaaatttattttttctgtattgaaccaattcattagtaacgcttttaaaccttctttcatcacatattcgctgtaatgattaatatcaattaaattcacaccatgaattttagcatctaaggcatcatgatgtttaatatcacctgtaacaaagacatctgcgccttgttggacagcttgatattcatatccaatacctgaaccaccaataattgcaatacgtttaattttctgattagactcaccaacaaaacggacacttgggatatttaatttagatttaatatcagctgcgaaatcttccaatgtcatttgattatccacttctgccataacgccaagtccataaagggatgtttgttttatctcaataaaatcaaataccggtgtttcatatggatggtattgtttaattaattgctcagcccttgacttttgatatgcatctatcataaattcaattttaacttcatctacatattcaattttatcaatttgtcctattgttggattagcttcaccaactggtttgaattgccctcttccttcactttcaaagaaacaatattcataattaccttcttgcgctaatccattttcactaagcttatctttaaatggtccaacattatccttaggtatatatgtttgaactttatagtatacatcttgttgattatttattattgaaatgttcttcaaacccatcgccttcgccaacatcatattgacaccatacggatttacatctaaatttgtatgcatcgctattaaattaatgtcatgttgaattagttttctaatgatcaaaccataaccattagcttttaatgatgttacgcctttaaagattagaggatgatgactaataatagtattataacctttttcgattgcttcatttactacttccaacgtacagtctaatgctgttaaaacaccagtaacttcaacatcttcatcacctattaacaatcctacattatcccaagattcagcagtactaaatggcacatgatgatctaacaatgtcattaaatcagctattttcattactataacaccctttcaattacagcaatttcgtcattaatttgagctaaacgttgatgatgttgttcagtattgagtttcgatttaatatgataaagtgcttctaactctctttgccatttttttataaaatattcatttttgttgttcagcaattttggtccgaatttcaattcatcagatgatagctctattaattctgtagaatattctgctacaacaatttcataaatatggcctttttcttccattattatttcatcaattatttcataattcaattgttgtaatgtttgtcttaaattttcagtttggatattactttgtaaaatcaaccttggatgttgacttaacttatcttgcccatcttttaaaattttagcaataagtggtccgcccataccacaaattgtgatattatcgattacgtcctcaggttgaataacacttaagccatcccctaaacgtacatcaattctatctactaattggtttgcagctacatttttcacagcagcttgaaaagggccttgaataacttctccagcaataccgcattcgcataaatggttttgaattgcatagattggcaaataagcatgatctgagccaatatccgcgattgtaccttgttttaaaaatcgacttaccgtcgttaatcggttatttaacgaaatcattttattctcctttatgaaaaaagaggttgaacattattcaatgtaccaacctcactcaagttaaatcttaatctaaaaataaataagcgcttattcatgtcttggtatcaatcattaaaattgatataaattaatccataaagtctttcaaacgtttactacgacttggatgtcttaattttctaagtgcttttgcttcaatttgtcgaatacgttcacgtgtaacaccgaaaactttaccaacttcttcaagtgttcttgttctgccgtcatcaagaccaaatcttaatcgtaatacattttcttctctatcagttaatgtatcaagcacatcttctaattgctcttttaataattcataagcagcatgatctgaaggactttgtgcttcctgatcctcaataaagtctcctaaatgactatcatcttcttcaccaattggtgtttctaatgaaacaggttcttgcgcaatttttaaaatttcacgaactttttctgctggtaaatccatttcttcaccaatttcttctggtgctggatctcgacctaagtcctgtaataattgacgttgaacacgaattaatttattaattgtttctaccatatgcacagggatacgaatcgtacgtgcttggtcagcaattgcacgagtgattgcttgtctaatccaccatgttgcatatgttgaaaacttaaatcctttgttaaagtcaaatttttcaacagctttaataagacccatattaccttcttggattaaatcaaggaataacataccacgacctacgtatcttttagcaatacttacaactaaacgtaagttcgcttctgcaagtcttgattttgctacttcatcaccttgttcaatacgtttggctaattcgatttcttcttgtgcacttaataagttaacacgcccaatttctttaaggtacatacgaactgggtcatttattttaacacctggaggggcactaagatcacttggattcagtttctcgtcagtatctgaactatctttttcattaactagtgaaatatcattatcatttaattgatcaaagaaatcatccatttgatcagagtcgatatcaaaattctgaagtttttcagcaatttcttcatgacttaaatgaccctcttttttacctttttcaattaattgcttcttaacatcttctaatgttaatgtcggatcaattgtttgttttttaattttaactgtgttatcagacatgaaacggcctcccgattttaaatatgaacattcgaaatttattcaatattgctattttaaactaaattcttaattaattcatccatatttttaattttattttacaaattggaactaatcccaatatttatttttcaatagtgttgtttaaatgcggtaactatcatttacccttatacattttgacataatcattattcgtattattctttaaaatcacatgctacatgcgttctttattcttagcaacaatttgctgtaaatagtatttttgtaattctacatcgccaatccttgtagcttcccttaatttatgattcaatgactcaattgtttcttgtcctttttcattaataacattgacataatcatcaatttcattttcatatggttcgtcattcaaattatattgttctaagctaattagtgtttctctcaactcatttgaattaacatactgcacagcatcactgatattatattgatcattttccgcataaaaatcatgtaagacttcgaatacatatttaaaatgctgatttgtgaagttatccttatcaacactttcataataatttaaaaatgtatctttatctctcattaaatgttttaaaaatgctcgctccgctttttcttgacggctcaaattgtcaaattgtgccataccaattggctcaggttcaatgtaaccgccatactcatcttctggataataattggctggtgcttgattgaattgtatttcgttagctaattgctcaggactaacattgaaaaatggtgcaacatcatttaaagccttttgttgcaaaatcgatgatttcataagcgaaatatcatgacttagttctttcaaataacgttcatatgaaaggtcattatgtgcaatttcatcttttaatatactcactttataatgtgcaaatgactttttgtcattttttacaaaagcagtaaatgcatcgttgccatacttaccaatgtattcatccggatccatgcctgatggcaattgtataacaaatacatttagcccttgctgtaacaaattttgacctgttttaagtgttgcttcactacccgcaaaatccccatcaaacattaatgttatatttgatgttaactttcgtataaaagtaatatgttcatctgacaactgtgtacccattgttgcaacaacgtttttcaagccagcagtatcagattttataacatccataaaaccttctagtaatacgatttcatctaattttctaattgatttacgcgctttatctaagttgtataacaactttcttttttgaaagataggtgtttcaggactatttaagtattttggttcttgaccggtatatgttcgacctgaatatccaacaattcttccttgcgcatttttcaaaggaaacataatacgatttcgaaatctatcgtaataactgaaattttcttcgttacgtgataataatccggcttcatatgctaattcaatatcgtaaccctttttttgaagaaaatcatgacaaaaatgtgagctatcgggtgcaaagccaatgcctcgctctttaataagcgcatctgtaaaaccacgttcttgtaagtacgttaatgcttgttcgccttcgactgtctttgttaaagcgtaataataaaattcttgtattaactcatgcatttcaatcatttgtaaatcatcagaagcaatttgaacatttgagttagattgtgttgcctcaatatctacagcaacattaactctatcacctaattctttaaccgcttcaacaaatgatatgtctttaatttcttgagtaaattgaaaaacattgccaccttttttacaaccaaaacaatgacaaatttgtttatcttcagaaactgtaaatgaaggtgtcttttcatcatgaaaaggacacaaacctatataattgcgtcctctcttttctaattttacatattcacttaccaagtctaaaatgtcggttttatcttttatttcattaatgatcgattgatctattcgcaaattaaatcacctattaagcattagttatactattatacctaattttcgacaaaaatgaaatcatttcgatttattttgttcaatataatggattatatcgtttgctgtttcttcgattgctttttgagaaacatcaatgacaggacatccaatttcacttacgatttcttcaaagtaattcaattcttcttgaattcgtgcttctgttgcatatcgagctgtgtcacctagtcctaattgttttagtcgctcttttctaatgcgatttaatttttcttcacttattttaagtgcgatacatttctttggattaatatcatataagccatctggcggtgtcacttctggtacaatcggtacattcataactttgtaactcttatgcgctaaatactgagataatggtgtctttgaagttctcgaaataccaagtaaaacaatatcagctttaggtaatcctttaggatctttaccatcatcatatttaactgcaaactctatcgcatcaattttcttgaaatatgcatcatctaatctatgaacgatacctggctcattataaggtttttcttcaaccgaagcagataataaatccattaatggccccatgatatcgacagacttcaattggaattctgctactttctcactcatatattgcttcatttcaggtttaataagtgtataaacaatgatagcatttgtatcttttgcaacttgaatcacttcatcaacatcttcaaaagattcaatatatggatatcttaataattcatttttacattgcttaggattgaattgtgaaatacctgccctagcaactaactctgccgtttcacctatagaatctgaagctacgataattttaattttttccattacttctcacctattctttatataatgctactaataacttagctattgttgttttggaaattcttccaattacttcatacttttgattatctttttttcttacaattggaatcgaatcaatttctttttcaatcattctatctgctgcgtatatgactaattcgctttcctctaaataagtgacattaggcatacgtgtcatatttacactgataggtactttatgaatatctgctccaatcattgaagctcttaataaatcttttcttgaacacacaccaacaaaatcgttatcttcattaataataaataatgtacttacatcttctaaaaaaattgtacaaatagcgtcataaactgttgtattctctcttagcacaacaggttgagacatatagtccttaacctcaaattgtcgaagtttttcattaaaaaatttgccttttgatttacctgaataataatatccaactcggggacgcgcttctaaaaaacctgacattgttaatatcgctaaatctggtctaagcgttgctcttgttaaattcaacttatctgctatttgttcaccagtaatgggtcctttagttttaacaatttcgatgattcgttcttgtctttgactgagttctataggtcttcaccccttttttattcacctattattataccgatatttctttcatgtcacaaacacattaattttacttgcctttaaataatctatcaattagaataaacgtacagcgagttaaggatagtgtaagcttaacaataagattggcgcaacgaatcattttaaaataaaagcgagtgactacactaatttgggtggaaccgcgggttaaatacgtaacttattttgtattatatacaatttaaaatattaactcgtcccatggaagtaaagcatatttactatgctgttattttccatggggcgttttcatgtatgaggagaggtaattatggcaaaagatatggatacaattgtttcattagcaaaacacagaggttttgtgttccctggtagtgatatttacggtggtttatcaaacacatgggattatggtcctttaggtgttgaattaaagaataatgttaaaaaagcttggtggcaaaaattcattacacaatcaccgtttaacgttggtatcgatgctgcaatcttaatgaatccaaaagtatgggaagcttcaggacacttaaacaacttcaacgacccaatgattgataataaagatagtaaaattcgatatcgcgctgataaattaattgaagattatatgcaagatgttaaaggtgatgaaaacttcattgccgatggtttaagttttgaacaaatgaaaaaaattattgacgatgaaggtattgtttgtcctgtaagtaaaactgctaactggactgaaattcgccaattcaatttaatgtttaaaacattccaaggtgtaactgaagattctacaaatgaaattttcttacgtcctgaaacagcacaaggtatttttgtaaactataaaaacgtgcaacgttcaatgcgtaaaaaattaccatttggtatcggtcaaattggtaaatcattccgtaatgaaatcactccaggtaacttcattttcagaacaagagaatttgaacaaatggaacttgaattcttctgtaaacctggagaagaaatcgaatggcaaaattattggaaaacttttgcaagtgactggttaacaagcttaaatatgagcagtgaaaatatgcgtttacgtgatcatgatgaagatgaattatctcattactcaaatgcaacaactgatattgaatataaattcccatttggttggggtgagttatggggtatcgcaagtcgtacagacttcgacttacgtaaacatgctgaacactctggtgaagatttcagataccatgatccagaaacgaacgaaaaatatattccatattgtatcgagccatcacttggtgcagatcgtgtaacattagctttcttatgtgatgcatatgatgaagaaggcgttgaaggtagtaaagatgcacgtacagttttacacttccatcctgcattagcaccatataaagcagcgattttacctttaagtaagaaattatctggcgaagcgattaagatttttgagcaattaagttctaaattctcaatcgatttcgatgaatcacaatctatcggtaaaagataccgtcgtcaagatgaaatcggtacaccttattgtgtaacattcgactttgattcattagaagataatcaagttacagtacgtgacagagattcaatggaacaagttcgtatgccaatctcagagttagaagctttcttaactgaaaaaacaaaattctaattaaaaagactttccaccatatgtggtggctatataatttataaaaagagatactggttagtaaaattgccagtatctcttttctattcaaaaaggtattcaaataaacacatctatgtggctacttgaataccttttattattttatgttattgttccaatctttttaattggttgattagtttctgacttttaaaaaacatacctgcatattcacgatataacattaaaatgatatctgacatttcatcaataatttcttgatggatattcaatgaattcattttatctatcggtaatttttgtaatacatctaataaatatagtgttttattcgataatataactgcatgtacatctttagaagcctcttgccttgaaatcgcaccgtcaaacttaaaactataacctattaaatctgcttgtgtgtcattaccactcacagcacagcgattaaatgatgcagtaaaaccaaatcgtttcatgcactttaacataactacgactgacattaactgtgcagatgtacctgattctattttttcaagaacaaattgtaataattgatagttatatggtgcaatgtcaccttcatccattgagcgctcaatagtttcagctgccagagcggcataactgcttacgtaaaggtccatttgtaatttataatgttgactaataacatctacagaatttaacgttcccatacctcgccactgattgtaaataaacaaaccataaacaaacaattgcgtttgcgcttgtaaacccgtcttaacttttttagcacgtcttgccataagtggtacttttgcaccatgctcatttaaaatcgtgataattttatcagattcaccataatcaactgctttgatgataatccctttttggcgcattaacaattatcttcaccacttttaagattaatcttggtcttcaacataaccaatttggcgaataaagttaactttgtttcgccagtctctttgaactttgacccataattctaagtaaactttagagcctagaagcatttctatatcacgtctcgcacgttttcctacttcttttaactttttaccgccttttccaatgacaattcctttttgcgaacctctttcaacatatatagttgcttcgatatgaacacgatcttcgctttctttaaccatacggtccacattaacaccaatcgcatgagggatttcttcacttgtaagatgaaggattttttcacgaatgatttcacccactacaaattgttcaggatggtctgaaatttgatcatctggataatatttaggtccttcgggtaaatacgtctttaaaacatcaataaaatgatcgacatttagcccttctaatgctgaaataggtacaatctctgtaaagtccatataactttgatattcttcaatctttggcattaattcatctggatgcactaaatctattttatttaatactaaaaatactggtgtcttaacatttttcaacatttctataatatattcatcgcctcgtccaatttcctcattggcattaaccataaacatgattgcatctatctcagataatgtatttttagcgactttcatcatatagtcacctaatttgtgtttaggtttatgaatacctggcgtatcaatgaatataatttgcgcgtcatctcttgtcataacaccttgaattttatttctagttgtttgagctttatcggacatgattgctattttatggccgatcactctattaacaaatgttgactttcctacatttggtctacctataattgaaacaaatcctgatttatgttctgtcatttattctaaatcctttcctgaaaatccaaatggtagtaactctgcgactgtcatcataaccatatctcctttatgatttgtcatatacacaggcatatcatcatcacataattccttcaaaacttgacgacatgcaccacaaggtgatgacggtttatctgcatctacggttacagttattgattcaaaatcacctggtctgtatccttgagaaattgccgataccaaactagctcgttcagcacatatcgataatggataagaagcattttctacattggtaccataaaaagttctaccgtctttcgtttttaaataagcccctactttaaattgactgtatggcgaatatgattcttgttgtgcttttctaacttcttgaaaataatgaggttgataactcatatatgcctccctaaaataacgctataaaatgtggtaaaaatactattaaacctataataaatgctaatattgaaactataagtacactaaaagccgcaatatctttagcgtatttagctaaatcatgatattcaacggtcactaaatcgacaacatattcaatagcagtgtttaaagcttcaacagtgagaactaatgcaatagcaatgagtataaatatccactcaatccgattaatatttagtacgagaccaaagacaatagcaacaatcattgcaaacacatgtaaaagaaatttatagtctttttgaattaagattttcagcccatcaagtgcatatttaaaccttttcataattagtctcgtgttaatccatatgcgtttaatattgtatcttgtcgaccaaacatttccttttcatccgcttcagtcatatgatcataacctaatagatgcaaaaatccatgtaatgctaaaaatcctaattctcgttcaaaagaatgtccgtaattgtttgcttgttcttgcgctacatccgtacagataattatatcccctaaaacacgtggtatatcaagaccactaaaatcaatctctggctcatcttcttctaaagcaaatgagattacatctgtaactttatctttatctctatatgttcgattaatttcttgtatttcttgtttatctacaaatgtaacagaaagctcagcatcgtcttctatatgctcttcttttttagcaaattctaataaatcttcaatttgtttataccaagcatctttaactaagcctgtgtgatcgctaaaatctatcgtaaacatttaattctctccttcataatgttcaatgatcttacttaccaatggatgtctgactacatcgctctgatctaatttcaatatacttatacctttaacgttgtgtaacctactgaccgcttccttaagtccacttttaacacctttaggtaaatcgatttgagtttggtcaccagtaactaccatttttgagccaaaacctagtcttgttaaaaacattttcatttgcgcatgtgtcgtattctgcgcctcatcaagaattacaaatgcatcttctaatgttcgtccgcgcatatatgcaagtggcgctatttcgataatgcctctttcaataaatcgctctgtttgttcacgcccaagaacagtatatagaccatcatataaaggtcttaaatatggatctaccttttctttcaaatctcctggtaaaaatccaagtgactctcctgcttcaacagcaggtcttgttaatacaatacgtttaacagcacctttacggagttgctttgctgcataaactacagctaagaatgtcttacctgtaccagcaggacctataccaaatactaaatcattatttttcatggcattaacatatatacgttgccccatcgttttcgcacgaatcgtcttaccaaatgcatctttagttatctcttcatcatataaatctaacagatgttgaattgtgttattatgcgccattttaatagctgcttcaacatctttaattgtaatattattacctaaatcaataaccttcagcaaattgattaatactgattccgctttttctacgttttctatttttgtacctttaacggcaacttcttgtcctcttgcatggatgacaacatcgaaactctcttcaattgcttttaaatgttcatcattatttccaattaaagcttgagattggttcatatcgtctatttgtataattccaggcatacacgcgctccttttcatatatcatttatattcattctatgatgctttaatatctacttaattatatcatgcaattgattgatttaaacatctttgcattgacttactcatttttctttaatttaaaataatcatttatacttttcaccttgtcataaaagcagattcaattttagactaatcaattttttgctgtaatttaaataactaatatttctcgaaaaattctctttgttttttaattttccttaacgtaaaaaaacaagcaactaccattacgatagtgcttgttttcaaaaaattttataattgttttggtttagctaaaatttctgaccatatcataccattgattacttcatctttatcaaattggaacgctgatttagtcaaatctttttcgacattttgagaattaagcagctgctttaatttcaaacgttttgtacgttcagataagtatttatcctcaataatatctctagcacgtttttccattttagcaatttgcttttctttttctctatcaatgtcagtacgaatcgttttaatatcatctctaagtgatttttctaattgacgtctaatttcgtcagaattatcttgtctagaaggtctatgtttctgctccaccggttctgctttaggcactgtgattggtttctctgtcatcggttttgtttcttgttgttttttaggtgccataggttctacaacaggtttcgatttaggctcttcctttggaagttcatcgaataaaggtggtaacgtatcatcatattttcgtttcgatgatttcttttcttcttcatttaattcttcacttatttctttaaacgttcgctcaatttcttcaaaaaagccacctttttttggttcattatcggtagatgttttttgaggtggcttttgattttgtctatctttatgactattttcgcgcatagtagtaatgatagaaatgatcactgatatgacaaaaattagaataccgacactcatttaatcacctctcgacttaatgttcaggtgactcatcatcactttgatcagttcgtttattaattgcatttctcatgcctgtatcagcttcgatatttttcaaattataataatctttaacactgatattacctgaacgtaatgcttcagccatagctaatggtacttcagattcggcttcaactactttagcatgcatttcttgtacacgcgctttcatttcttgctcagttgctacagccatagctctacgttcttcagcttttgcttgtgcaatatttttgtctgctaatgcttgttcagtttgtaagtctgcaccaatatttttactaatatcaacgtcagcaatatcaattgataaaatttcaaatgcagtacctgaatctaaacctttgcttaaaactgttttagaaatattatctgggttttcaagtacttctgtatgatgcttactagaaccaattgttgaaacgataccttcaccaacacgtgcgatgattgtttcttcaccagcaccaccaacaagtcgagcaatattagctctaactgtgatacgagctttggctttcacttcaataccgttcattgctacacctgcgataaatggtgtttcaatgactttaggattaacagacatttgaaccgcttctaatacgtcacgtcctgcaaggtcaattgcagcagcacgttcgaaaggaagatcaatgtcagcacgttgtgcagcaatattagcgtcaacaactctgtcaacatttcctcctgctagataatgcgattctaattggtttgttgttaatgctagtcctgctttgtgcgctttaattaatggcgctataacttttcttggagatacacgacgtaaacgcataccaaccaatgtacctataccaacatgaacgccagctgctaacgctgaaatccataaaccaatgggtacaaatgagaataaaataagtaatgcaactactataataactgctattacgataaaacttaaactaaacatggtatcgctccttttaattaatctacttccctcacaactactcttgttccttcaacttcaaggatttttaccgttttattgcgcaaaataaagttgccatctgaaacagcatcaatacgttcattttcacaaaaaataatccctgcaggtcgaagatctgtaactgtttgagcagtctttcctacgaggtgcgagcggttatcatgagaattgtaacctgactcagaattagttgaatcttttaagataactttatccaaaaacggaatctttctgttgaaaatcttcactaatatcacccattctacaatcgttaaaatcaaggcaacgataacattcgcaagcataaatagcaaattatcaccgagcgttgttatgcttatagttatcagtatcatgccaataataccaattactgcaccaactacaaataattcaattacaactaatataacgccaattgagaatattaagatagaatgcatattgacatttccttggattagaaatcccaaaaataaaataagtaatgataatgtggcgataataccagctgcattgatttttttagagtaaagttgatatacaaatcctaagaatgtcaaacaggttaatattaacgtaaaaataggttgaacaattatattgctaacttgttcaacccaagtatctccagccgttgattccaagatagttgtcatttgtaaaaaattattataactcacaatttcacctcgccctcacattaattatacatgaaattgaatatactttatagttataagaacctatagaatatcaatttgattatttataaactatataactttttttaattaaaaattgacaacaaaaaaacatcacatattagtgtcagacactaacttgtgatgtttgttttatataattaatattcgtgttgagggagtcaacagaggtattaattatttgaatttacgtttacgtgcagcttctgatttctttttacgttttacgcttggtttttcgtaaaattcacgtttacgtacttcttggattgttccacttttagaaactgaacgtttaaatctacgtaacgcatcttcaagtgattcatttttacgtactactgttttagacatctgtatttccctccctccaaatatcaacggaactttatagtcaattgcacagtaaaactatgcatttataagtataatatatctgtaatttatggtcaattagtaaattgttttttatttgaaacatatttcacatcaaaatcacaaagacttttagattttgttctaaaaatctcttaataatttatttaatgagaagagttgcttatatagtaaattgtgaagccgttaaaacaacgttacaaaacctatatctttaatacggaaccatatggtatgaatcaaggaatacttaaactaaaacttctctatcagatttatttgttgcgaaatcaacaactttaattgcttgcccttcatttaatggataatttgcttgcgtaattttaacttttacaatttgacctatgagtgattcgtcaccttcaaattgtactttcatataattatctgcatatccaactaatgtaccttctgtgtcaccctgttcctcaggaattacttcaagcacatcttgatcaaatttagacgcatataactttccgagttgattgcttagcgtaattaacttatgcacccgttcatttttaatttcttcatcaatttggtcatccattcttgcagctggcgtgccaattctaggagaataagggaaaacatgcagttcagagaacttatgctttacgataaaatcatatgtttcttggaactcagcttcagtttcacctgggaaaccaacaattacatcactcgtaactgccaagtctggtaaagctttatgcaattttgttaatcgttctgaaaatctatccattgtatacttacgtctcatacgttttaatactgtatctgaaccagattgtaatggaatatgcaaatgacgcacaacttttgttgaacgttctaaaacgtcaattacttcatctgtaagttgacttgcttcaattgaagaaattcgaattcgttctaatccattaatcgtttcaagatcacgtaataattgggccaagttataatcttttaaatcttgaccatatccacctgtatgaattcccgtcaatacaatttccttatatcctgaattcactagttgcgtcgcttgttcaactactttttccggatctcttgaacgcattaagccacgagcccatggaataatacagaatgtgcagaagttgttacaaccttcttgaatttttaatgacgcacgtgttctatctgtaaaataagggacatctaattcttcatatttacgatttttcatgatatttccaacaccattaattggttggcgttctttacggaattcgtcaatgtaacctaatagtttatgtctatcttgtgtaccaactactacatcgacaccaggaatttccataatttcagctgatgaagtttgcgcataacaacctgttacacagattacagcatcaggattttgtcttattgcacgtctaattatttgacgactttttttatcacccgtattcgttactgtacaagtattaataacaaatacatcagcattcgcttcaaagtcaacgcgctcatagtttgcttctttaaataattgccagattgcttcagtttcataatggtttactttacaacctaatgtgtgaaacgcaactgttgacataaatattcaccccattaattctttttcataacttattgcacttaacgcatacaatggcgcagtttctgcccgtaaaattctcggcccaagaccaacaactgtactagtattactaaataatgaaatttcattttctgacaaaccaccctcaggaccaaaaatcatcaacactttatcctgagcattgaattgttgtaaagtttgcttgaaattgcttaactcaccatcttttgcttcctcttcatatgcaataagaatatagtcataattatcaatagtatcacaaattaattttaaattcgactcgaattgaatagatggaatcactaaacgatagctttgttcagcagcttctttaattattttttgccaacgctctatctttttggcaacttttgcctcgtttaatttaacaattgaacgttccatgctcacagctataaatgatgaagcacccaattcagtagctttttgtagcaaccactcatatttgtcagctttgattagtccactgcaaatcgtaacatcaactggcaattctgtattaatattttgtttttcttttaaatcaacttcaattttatcacttgttatgtcagcaatttcacataaataaactgtttgatcattaaaagttaaaataattttactaccaacatcatatctcattacatttgttatatgatgaatatcttctttttttgtaataaaaaaacgctgacttacatcagcgttttggtctatgaaataacgttgcacattattcactcactttctggccaacaagacaaacccaaccgttgtcatgttgttctgaaataattttaaaacctacacgctccatatgtgactgtataccttcatacttctcttttataataccagaagtaataaaataaccgccttcatttagagtattataagcatcttcaatcatttcatcaataatatgcgctaaaatatttgctattacaatatcaaatttttctgtttcgtctttcaataagttacctggaacagcttcaattaacgtttcacaatgatttcttctgaagttttctttagctacactcactgccatttcatcaatatccaacgctttaatacgttttacaccgattagatgacttgcaatacttaatatacctgagccagtaccaacatcaattactgaatgctgtggcaatacatatgtttctattgccttcaaacacatacttgtagtcggatgatcacctgttccaaaagccatacctgggtcgagctcaatgcaaagctcttcatccgcttctttagcatatgtttcccaactaggaactattgtgaacttcttcgacgctcggaatggatggaaatagtttttccattcattttcccaatccgtctctgcaataatttgctcactgaattgaacgttatgttgatcaagttcatctaaatttaataactcatctttaatttgctgtcgcaacttatcatcataagtcatttcattaaaataggctttcaatcttactcccttatctggataatcctcttttttcaaagcgtaaatttcaccgtatttatcttctggttggttaattaaatcatctgaatcttctatcacgacaccatttgatccatgattttcaagtatattggtagccaattctactgcttcatgattaataataattgaaagctctgtccagttcatactttattctcccttaaagaatctttttgctctatctttaaaattcgaaggttgttcattaatttcttcaccatttaattgggcaaattctttcattagttctttttgtctatctgttaatttagtaggcgttactactttaatatcaacatataaatctccgtatccatagccatgaacattttttatacccttttcttttaagcggaattgcttacctgtttgtgtaccagcagggattgttaacataacttcattatttaatgttggtatttttatttcatcgcctaaagctgcttgtgggaagctaacatttaatttgtaataaatatcatcaccatcacgtttaaatgtttcagatggtttaactctaaatactacgtataaatcaccagcaggtcctccattcacgcctggagagccttcaccagctaatctaatttgttgttcattgtcgacaccttcaggtactttcacttctaatttaactgttttattttcagtaccttttccgtgacatgttggacaagcttcttcaaattcttgaccacttccattacatttaggacaaacttgttcagtacgaactctacctaaaattgtgttttgttctacagctacatgaccagcgccattacagtaactacaagtctttttacttgttccaggctttgcaccatcaccatgacatgtttcgcatgttacatctttacggattgaaatttcttttgttgtaccaaataccgcttcttcaaatgttaatgtcattgtatactgaagatcatcacctttttgcggtgcatttggatctctttgtctgccgccaccgaagaaagagctaaagatatcttcaaaaccgccgccaccgaagccactaaaaccgccaaagtcagagccattgaatccttgtccaccaaaaccttgtggaccatcatgtccaaattgatcatagcttgcgcgtttattatcatcacttaaaacttcataggcttcagaaatttctttaaacttttcatctgcaccttcttctttgttaatatctggatgatattttttcgaaagctttcgatacgcttttttgatttcatcttttgaagcatccttactaatgcctaaaacttcataataatctcttttggccacagctatctctccttttcttaattaactcatatagtttaacgtaatatgtcatactatccaaataaaaagccaaagccaatgttctattgactttgacttttcagatcatgacaacattctaattgtattgtttaattattttttgtcgtcgtcttttacttctttaaattcagcatcttctacagtactatcattgttttgaccagcattagcaccttgtgcttgttgttgctgttgagccgcttgctcatatacttttgctgataattcttgaatcactttttcaagttcttcttttttagatttaatatcttctatatcttgaccttctaaagcagttttaagagcgtcttttttctcttcagcagattttttatcttcttcaccgatattttcgcctaaatcagttaaagttttttcaacttggaatactagactgtcagcttcgtttcttaagtctacttcttcacgacgttttttatctgcttcagcgttaacttcagcatcttttaccatacggtcgatttcttcgtctgataatgaagaacttgattgaattgtaattctttgttctttatttgtacctaagtcttttgcagttacatttacaataccgtttttatcgatatcaaacgttacttcaatttgaggtttaccacgttcagctggtggaatatcagtcaattggaatctaccaagtgttttattatccgcagccattggacgttcaccttgtaatacgtgtacatctactgatggttgattatctactgctgttgaatagatttgagatttagatgtaggaatcgtagtgttacgttcaattaacgtattcatacgtccacctaaaatttcaatacctaaagatagtggtgttacgtctaataatactacgtctttaacgtcacctgtgataacgccaccttggattgcagctcccattgccactacttcgtccgggtttactcctttgttaggctctttaccgatttcttttttgacagcttcttgtactgctggaatacgagttgatccaccaactaagataacttcatcgatatctgagtttgttaagccagcgtctttcattgcttggcgtgtaggttccattgttcttctaattaatgaatctgataattcttcaaatttagaacgagttaagtttacttctaagtgtaatggaccgttttcaccagctgagataaatggtaatgagatttgagtttgtgatacacctgataagtcttttttagctttttcagcagcatctttcaaacgttgtaatgccattttatcttgagataagtctacgccattttcttttttgaattctgcaactaggtagtcaataattacttggtcaaaatcatcaccgccaagtttgttgtcaccggctgttgatagtacttcgaatacaccgtcacctaattctaggatagatacgtcaaatgtaccgccacctaagtcaaaaacaagaactttttcatctttatcagttttgtctaaaccatatgctaatgctgcagctgttggttcattaatgatacgctcaacttctaaaccagcaattttaccagcatctttagttgcttgacgttcagcatcgttaaagtatgcaggtactgtaattacagctttgtcaactttctcacctaaatagctttcagctgtattttttaagttttgtaaaatcatagctgagatttcttgtggtgtgtatgatttaccttcaatatctactttataatcagtacccatatgacgtttaatagattgaacagtgtttgggtttgtaatagcttgacgttttgctacttcaccaacttgagtttctccatttttgaaagctacaacagatggtgttgtacgtgaaccttcagggttttgaattacttttggctcatcgccttctaatactgttacacatgaatttgttgtacctaagtctataccaataattttactcataataaaattcctccatttaatcattaaattaatttaattttaaacaatgtcttttcgccaaatttaagttattggtttactttgaccattgatggtcttaatactctatctttaagcttgtatcctttttgtagttcttgagtgatttcgccagattcaaaatcagggttatcatcttgaactacagcttggtgaatatttggatcaaatgcttcaccttcagttttaataacttcaagaccattatcttttagtgcgttaatcaaactttcatgcaccatttgtacacctttttgaagagatttaaaagtctcatcatcaccttcaatttgaagtgcacgttctatattgtctattgctggtaaaatatctgttaacacacgttgtgcttgatatgttttgtttatttcattttctttttgaattctacgcttataattttcaaactcagcgtagagccttaaatatttctcttcgttttcatctgctaattgttgaagttcattaattttttgatcttttggatctatttcttcaataacattctcgtcagacgtttcttctattgcttcatcttgtaaatgacctttactttcttcagcttgttcaactgaatcatcaatattttgtttgacgtttgtttcttcaactgttgattcagtgtttttttcaactgattcgtctttatttgtcattttctgtcctccaatactttctaatccatcattaccaaattctatttaataattgaatgacattttgataatgcatagctgtaggtccaatcacagcgatttgaccttttaacgtttcatcaaaatgatattgacttgttacaattgaaatatcacttaagctgtcatcaatttcattaccaatttttacattaatatttggtgaagatatatcttgtaataattctgcaattctatttgattctatatattgtagaatgggctgaattgaagatacattactttcattcaatgcatcaataagtttaacctttccacccatataaatgctattactttgattagaaatatgattattcatcgtatttaacaatttattgataaaaatttcttcctgctctgattgaacaaaagagacaatatcatcttgtaaattctgattaaactcagttagtttgtttgtaacaaaatttgatattgtatttagtttgtcattattaaacggtatgtctgaagcaagatgtacatgctcaacatgacctgatgaaaatacgataaccattataactaaattaggattagcacgaatcaagtgtacattattgataatatcttgtttatgattaggatgaacaactaaagttgtatattgagatatatttgataattcatctgcaaaatatgtcaatgctgatgatacatcatattgattctcaactaacaattgatttaatcgtcttaatttatttgttttttgatgagatgtttgttcaagtaaacgattgacataatacctaaaacctaattgtgatggcgaacgccctgaagaactatgtgtcttctcgatatagtttaaatcttcaagctgtttcatctcatttctaattgtagcaggactaacattcaagttatgtcgctcaattagtgttttagaaccaacgggttgtccaaaatcaacataatcctcaacaattgcgtttaatatactcaattgcctatctgtaatcatgttttcacctcattagcactcacttatctcaagtgctaattataatttatcaaattggtcaaagtaagtcaatgttaaagactcgaaatttcaattttttttaatcatttattaggaaagcttcaaaaacctcattacctatgactttccctctatttgtaagtgcaatcacatcgttcttttctacaattaattccttctcttttaaattatttattgtttgaccaaagacactttcaatagattggtcaaacttctttttgaacctactactactcacaccttcatttaaacgcaacccaagaaacatttcttcttccattctctcagtcaaagaaggtttatttgatactaaaattgctttactttctttatttatagctttgatataatgattcactggattgatattcgtataacgcacaccatctacataaccacttgcacctgctccaaatccataatattcctcattaaaccagtaaaccttattatgttctgattcatggccatctaatgcaaaattagatatttcgtattgatggaaaggagattgttctatcttagacatcagcaactgatacatgtcagcacctaaatcctcattagcaagtttgagcaagccttttctatacatattataaaattgggttttaggttcaagtattaagccgtaactcgaaatatgttgaatatccatatctaaagctagatctaaactttgttcaaaatcttcaatcgtctgtttcggtaaatgatacattaaatctaaactgattgatttaatacctgcgtttttagcatttaacaccgaagtgtaaatatcttcagtattgtgcgttctacctaaaacagacaataactccggcttgaatgtttgaacgcccattgaaatcctttttactccatatttctctaatagttggactttctctttagttaactcatcaggatttgcttcaaatgtatactcgcctgtgattgtaaacgtatcacgtattgctttaagtaatctttccaactgattaatagaaagggccgttggtgtgccgccacctacatacatggtctttaagatcctatattttgctgtagacatttctgtgattagtgcatctaagtactcatctacaggttgattctgtataaaatatttattgaaatcacaatatgtacatattcttacacaaaatggaatatgtatatatgcactttgtaccgtcattttaatgccccgcttctcagactttttatccaatcggctatatcctgttggactatctgcaattattcttacttttaactttaacgtttaatcaatgattgtctaatatatcgattcattttaatatttattcttgtttagagggagtgagatagaaataataaagaaccactaatgatttattatgtagtggctcttacacattagccagatgtaatatgtccttaaaaataaaattacatgagtaaaactcatgcataagggagtgggacagaaatgatattttcgcaaaatttatttcgtcgtcccaccccaacttgcattgcctgtagaatttcttttcgaaattctctatgttggggccccaccccaacttgcacattatagtaagctgacttttcgtcagcttctgtgttggggccccattgttataagctcattttaactctgtcgatggctgccaatataacattgtaaagcccaggacgttaatttatcctaggctccctctttttagttattaaactttattcattgtaaattgttaattgattttttaaaattattcatcatccattttcaatacagccaagaaagcatcttgtggaatttcaacattaccaactgctttcatcttagctttacctgctttttgtttttcaagtaatttacgtttacggcttatgtcaccgccataacatttagctaaaacgtttttacccattgatttaatatttgtacgcgctacaattttttgtcctattgcagcctgtacaggtacttcaaattgctgtcttggaattaacgttttaagtttttcaactaatgctttaccacgttcatatgcaaaatctctatgaactatgaagcttagcgcatccactttatcaccatttaataaaatatccatcttgactaaattactttctttattttcgatgaattcataatcaaatgatgcatatcctttagtattagatttaagttgatcgaagaaatcaaatacaacttcagctaaaggtaattcataaacaatatttacacgaatatcatctaaatagtccatatttataaattgtccacgtttacgttgacataattccattactgcaccgacatagtcatttggaaccatcatagttgcacgaacatatggctcaaatattttatcaattttatcacgatctggcatttgtgctgggttatcaaccgtcacttctgaaccgtcccttaaaacacattgataaattacagatggtgcagttgcaattaattcaataccaaattctctttcaattctttcttgaattatttccatgtgtaacatacctaagaaaccagttctataaccaaaacctaatgcttgtgacgattcaggctcaaattctaatgatgcatcattcaattgtaatttttctaatgcttctcttaaatcattataatttttgttatctattgggaacagtccgcaatataccattggattcattttcttataaccttgcaatggttctgatgcaggtctactagctaatgtgatggtgtcaccaaccctagaatcatcaacatttttaatacttgcaataatataaccaacatcaccaactgttaattcatcaactggaagctgcttaggtgtattaattccaacttctgttacttcgaactctttaccagtggccatcattcgaattttatctccggctttaacaacaccgtccacaattcttatcgatgaaattacccctctatatggatcatactcagaatcaaatattaacgcttttagtggtgcttctgggtcaccatctggagctggcacaacttcaactattttctctagtatctcttcaattccaatgttagatttagcacttgctaaaacaacatcgtcttggtctaaacctatcatatcttcaatttcttgtttcacgcgttcaggttctgcagcaggtaaatcaattttgttaataacaggcaataactctaactcattatctaatgctaaataaacatttgctaatgtttgtgcttcgataccttgagccgcatctactactaaaatcgcgccctcacaagctgccaaagaacgtgacacttcatatgtaaaatcgacgtgtccaggcgtatcgattaaatggaatgtataagtatttccatctttagcttcgtactttaaacgtactgcgtttaatttgattgtaataccacgttctctttctaaatccattgaatctagtaactgatcttgcatatctcttgtttcaactgatttggtattttctaaaattctatcagccaatgtagattttccgtggtcaatatgtgctataatcgagaaattccttatattctctcttctttttaagcgttgctcattatccattttatccttctcactttcataaaataaacccgtattatctttcgcatctttgatataataacgtttttaataggtaaatgcaaacgccataatcttggatgaactttgaaattataacaatctttatttaaatacatacttgcgatatgttaatatgttaattacgtacttataattataaaacgtattgattgtgtttccaacacaatttattaaatctgcaaaattttaagctaaccccatcaaataaatgattgcacaacggttagacttttgttaaaatatttcttgttgtaatcaaataaaattttgataagatgaactcacttttaggaggtgacagaaatggcaaatatcaaatctgcaattaaacgtgtaaaaacaactgaaaaagctgaagcacgcaacatttcacaaaagagtgcaatgcgtacagcagttaaaaacgctaaaacagctgtttcaaataacgctgataataaaaatgaattagtaagcttagcagttaagttagtagacaaagctgctcaaagtaatttaatacattcaaacaaagctgaccgtattaaatcacaattaatgactgcaaataaataatctttttaaataaaagttcaagcgcatgcttgaacttttattttttataaagatagaatgaataattccagtattaactgtttatccatatatgatgatttaagtttataatcagtttccgcacaagcatctataatattcaataattcatcaagttgataatgtcttacttgtcctaacgctaattttactctgtatggatgtactcctattgttttagcaatttgctgtccactatatcctttttgactcagaatcttacattgataaaataatcggtaattacttgtaattagtgcaagtaatttaattggttcttctttcatagttattaaatcttttactaaatgaattgcttgttctttctttcttttctgaatgtattcagtcagtaaaaatacattttgctctaaacttctattaataatttggttaacatcctgcttattaattgttggtctatcgcctaaaaataaaatcaacttttctatctcttgtgagacaatattaaagttaatacctgtcaactcaataaataaatctaatgcatctcttttgatatctttgaaattctcatttaatttactttgaatccatttttttatttcttcttcagacatttgctctatttttttaagccttgcatgcttttttagagttttagttaacttttttctttcatcaagtttattttgatatatctcaaagacaatcaaattttcgccatcatatttttcaataaattctattaattgatctacattatgagccatatcttttggcgctttttcacctgtaaatatatatgcatttttaaccaaaattgcttttttatctgaaaagaaaggcaatgttaatgtttcttcaacaattggtgcaatctctgtttcgtataaattatatttcacaaagttaaagtcatctctatcacttttcaaaaattgtgatatgatttctgcactttgtttttcaaccaattcaggcacatctccataaatagctacaatattgtcgctcattcattacaccctttcattcgtttgacacatcaatagattatatcatgtttctgtatctataaaccacttgcatttccataagagcttgaatcaacttttaaattatcatctaagtcaattgtaacttgaccgttttgttgactattgtaaatgcgactgcgaatcctttgcaatcgtttaacaacttctatattaggaagatgatacatattgttcttcccagaagaaatcaaacttattttaggcttaatcatctctataaattctttagaactacttgtcttgctcccatgatgtcctacttttaaaatatcaatctccggcaagttatatttttttagtagtaaagattcattatttttactagcatcgcccattaataaaacttttttattttgatatgtaatcatagtaataatcgaatactcatttttatctcggctatttggaataaaactatcaaaaaatagaaaactactatctccaagtttaaaactactaacttgtcttacatccataagtttaatgttgtacttatggcttaatttcgataataacatcaatgtattactactatatcccttattgtatatcactatatgtttaattttaatatgactaataatatattccacttcaccaatatggtcattgtgtggatgtgttaaaattagatactctaattcatttatccctctttcatttagcgttggtaaaatatgatatttagaaattgaataactaggttgtttagtatcatcaatcactttcccacctgtatcaatcaagacattttggttcttaccgccttcatataaaatactgtctccctgccccacatttaacattgtaattttgtgatgtgaatttgttggaaacgttattaataatgtcagaataattatagtccaaaacgtaaccaatatatatttacgtttagccaataaccaaaatatgtaataaacagaaattataaatactataaatatccaatcattaaacttgggaacagaaaaatgtgattgcttgattcttgtgaataggtctagtaaccagtcatgaaaattaaaacttaggtcaaccaagtaatttagcggcgttaatcccacaataaaatgacttgtaataaagaataaaatagatagcggaaacaatataatcgaatagtacggtacaaaaatcaaattagataaaaatcccacccattgaagttgatgaaagcttggaatggcaacgataaatgaagctaattgtgcaataaacgtaattatgaataatgattgtaactttgacaattgctgtaaaaaaggaaaaagtagcataataaaaaatgaaatgatgaatgaaaattgaaatccaatatcataaacaactagtggatttaaaataaacataattataaatgcaaatgctaatagctgaataccctttattttaatttgcttagtaataaccagtacaagagttgtcattattatagctcttacagcactaggtgcataatttgtgtattgagcaaataaagctaatacaatgattgtaattcctttaatgacaaataaaggtaaatttaatcgttttaaaggttggtaaattaaaaatacaattgcagctatatgcgagccactaactgccagcaaatgatatatacctatctctttaacacgttccttaaattgctcattaacttcttttacgtcaccagtaatcaatgccataatacgatccggaaacttaatacccgaatcataaattcgattcattataaactgtttatgtttctcaattaaattagaccggttcgattctaggcagctttgtacaactatactttgtaatttaagagttacaaacttattgtcattaactttgaattgtcctttaacaatacaattacgactttcaattttctttaaatcaaaattctttttatctgttaaaaagaaaggatatatttcattttttaaactcaacctacctttatatgtgtcactaccttgacgttgaatttggattacttgagcacgctcattaaactgagaattacgttcaatataattgatataattaaatattgcttgttgtgaataatgtaaataccatgcggagaaaatgattaaaaagagagaaataggggcataaacgattttatttttacgataagtaatatacaaaagtaaaatgaaaagaaatgtagagagcactttgctagaattccaaagcactcctacaatcattgataacgcgacaaacagcaaaacattaacctttagtcagatatttagcaacatattctggtgaaaatggaatttttttaaattcaataccagattgtttgagtaatttagttgcatattcatggttatgataatcttctgcatagtagatacgctttatacctgcttgaataattgactttgtacaatttaggcatggaaaatgagtaacatagattgttgcaccttcagtagatacaccttgttttgcacattgtaataaagcattcatttctgcatgtatcgttctgatacaatgtccatcttcaattaaacatccttcatctatacaatgcacctcgccagctacagagccattataaccaccagcaataatacgattatccttaacaatcgttgcacctacagataatctttgacaagttgaacgtaatgctagcaaatgactttgtgccataaaatattcttcccatttgattctttccaagatgttcaccttccatacttaaaatttagtaacattttctaataatataagattaatcacaaaaaataaaatttgcaattaaaataatccattatgtcgtgaaataagatttcagtttatcaaaagttttacttccaaaaccttttacttttttcaaatcgtcaatttcttgaaatgcaccttgttggttgcgatattcaacaattgcattagctttagcttgcccaactccaggaacagacatcaattctgatacagatgccgtatttaaatttactttagtattatttgtgttcccatttttttcgtgcacactgtttacttcaatttgtggttcaacattcttttgtcctttatgaggtatgaaaatcattttttgatctgttaatttttcagacaaattaatttgacttacatctgcatcctccaataattgtgctttatcaagtaaatcaactactctatccttagatgtcattttataaacattaggatgtttaacagcaccttttacatcgacatatacaggacccttatttttggaattatctccatctttgacctggacatcttctactttggacaaactactattttcactagtgctttgtttcagagcagtatctttattttcaaaatttcttgaagtataatcatcttgtctccagaatataaaaccaattaataccataattaaaacaacagcacttagaatatataacttccattgagttaaaaaatctttatagcgtaataaaaattgatacaataaaaccactcctcaactttatacacgtctgagcgagtggttttacttttattttttcgcaatgaaaaacaatctttctgcatcttcattatgttcatctatattaaaatcagtaaatgtttcaacatgtttaaaaccaacttgagctaaccaagacaaatatgtcttttcatcaaatgttctctgaaaatgagactcatcaaatcttgaatatgtttcatcttcatgtcgaatgaaaaatgtcatatcatgataaacacttaaaggtaaatctccttgcacagcatcccatgctaaaaaaatgtcccctttatcatcaatataactttgattattaaacaaagtcatcattttataaacagtatgtacatcaaaaataaatacacctgaatcagtcagatgatgataaacattgatgaatgtttcaatcactgcagtttcatcttgcaaataatttagagagtcacaaaaaatagtgatgatatcaaattgttgttgcaaatcaaaagatgtcatatctccttcaagccaatttacatttgctgatttttgagctgcaacagtcaacatatcaacacttaaatccataccagtaacattacctaaagcttctaattgaactgttaaactaccagtaccgcatccaatatctaaaatatttgattcatctttgcagtgattttttacaatttcaaaccatttttcatatggttgatcttgagtcaattgatcgtacactaggctcatttctgcatattgcgacataattaatacgcaacctgactatatgattctaatggtgcatcttgatataacttttcaatattataataatttctttcgtctttatggaaaacatgtaccacaacatcagctaagtcaattaatatccaacgcgcttcattgtatccttccatacgttttacttctatattttgttcattggctacttctttcaccgctctagcaatcgcttgaacttgtcgttcattatttccgtgcgttacaacaaaataatctgtcatatcgctgatacctttcatttctaaagaaatcgtatcttcgccttttttattgtcaattgcatccacagcaattgctaataattcttgtgaattcatttaatcatcctttattctttcgtcactatagttataataatttaaacagtcaatcgtcttattatataccgtaatatctttctgtattaaaaatagtactgtgcgtttagaaatttcataaattgtcttatctaaactaccttgattgtatgccatatctcgaatatcatcaactcctgggattgttcttccaggttcgatgtaatctgcaataaaaatcagtttttcagtttttgtcatttgttgacgtccagtagtatggtatttgatagccattaatacttcctcatcattgataccatattcatgttccatgattgctgcacacacagggccatgcaatatttcactaccataactcagtagatcattacctaattcgtattgtcgaacaatttgatacattttacctaaatcatcatatttacagaaatcatgtaatacacctgctaattctactttactagtgtctccatcataaatttctgccaatttaatcgctgtttctgcaactcttaaagaatgattataacgtttctctggcagtttctcttttgcaagccgttttgctttttcaatgttcatataatccttcccccttaatatagttttcaacggatttaggaacaagaacttggatagatttcccttcactaactctttgtcgaatcattgtcgaacttatatctaccctaggtatctgaattgcaatcatagcattttcaacattttgactatttttgtctcgatttacaactacaaaagtaaccatttcttttaagtattcaatttgataccatttctctagttggttatactgatccgtcccaataacaaagtacaactcactgtctttgtgttgctccttgaatgccttgatcgtgtcataggtataactttgaccaccacgtttaatttcatcgtcacaaatatctccaaaaccaagctcgtcgataatcatctgtatcattgttaatctgtgctgaacgtctataaaatcatggtgctttttcaatggagacataaaactaggtaaaaaataaaattcatctggctgtaattcatgaaatacttcgctagctactatcatatgtgcagtatggatagggttaaactgaccgccgtaaagtactatctttttcattattatggcaattcaatttctttattatctttagattctctataaatcactatcatagatccaatcacttgcactaattcactatgagtagcttcgcttaatgtttcagctaattcttttttatcatcaaagttattttgtagtacatgtactttaatcaattctctgttttctaacgtatcatctatttgtttaatcatattttcgttgataccgccttttccaatttgaaaaatcggatcaatattgtgtgctaaacttcttaagtatcttttttgtttgccagtaagcatatgttattctccttttaattgttgtaaaactgctgttttcatagaattaatatcagcatctttattagtccaaattttaaagctttccgcaccctggtaaacaaacatatctaagccattataaatatggtttcccttgcgctctgcttcctctaaaataggtgttttatacggtatataaacaatatcactcattaaagtattgggagaaagatgctttaaattaataatactttcgttatttccagccatacccgctggtgttgtattaataacgatatcgaattcagctaaatacttttcagcatctgctaatgaaatttggtttatatttaaattccaagattcaaaacgagccatcgttctattcgcaacagttaatttgggctttacaaattttgctaattcataagcaatacctttacttgcaccacctgcgcccaaaattaaaatgtatgcattttctaaatctggataaacgctgtgcaatcctttaacataaccaataccatctgtattataccctatccacttgccatcttttatcaaaacagtgttaactgcacctgcattaatcgcttgttcatcaacataatctaaatacggtatgatacgttctttatgaggaattgtgatattaaagccttctaattcttttttcgaaataatttctttaattaaatgaaaatcttcaattggaatatttaaagcttcataagtatcatctaatcctaaagaattaaaatttgctctatgcataacgggcgacaaggaatgtgaaataggatttcctataactgcaaatttcatttttttaatcaccttataaaatagaatttcttaatacaacatcaacatttttaggaacacgaacgattactttagcccctggtcctatagttataaagcctagaccagagatcataacatcgcgtttctctttgcctgtttcaagtctaacagcctttacctcattaagatcaaaattttgtggatttccaggtggcgttaataaatcgccaagttgattacgccataaatcattagccttctccgttttagtacgatgtatattcaagtcattagaaaagaaacaaactaacggacgtttaccacctgatacataatctatgcgcgctagaccgccgaagaataatgtctgcgcctcatttaattgatatacgcgttgttttatttctttcttaggcataataattttcaattctttttcactaactaaatgcgtcatttggtgatcttgaataatacctggtgtatcatacataaatgatgtttcatctaaaggaatatctatcatatctaaagttgttccagggaatcttgaagttgttactacatctttttcaccaacactagcttcaatcagtttattaatcaatgtagatttcccaacattcgttgtccctacaatatacacatcttcattttctcgaatattcgcaattgatgataataagtcgtctatgccccagcctttttcagctgaaattaatacgacatcgtcagcttccaaaccatattttcttgctgttcgttttaaccattctttaactcgacgtttattaatttgtttcggcaataaatccaatttatttgctgctaaaatgatttttttgtttccgacaatacgtttaactgcattaataaatgatccttcaaagtcaaatacatccacgacattgacgacaataccctttttatccgcaagtcctgataataattttaaaaagtcttcactttctaatcctacatcttgaacttcgttataatttttcaagcggaaacaacgtctgcaaatcacgtcatcacgaaacatattatgctctggtacaaaaccaggtttatttttatcttcagattgaagtggcgcaccacaaccgatacattttaaaatgtcagacaatcaattttcctcccatgtgatataaccttttttactgaaatgacgtaataatcgtctttcaattaatctattaaacttagtaataaagccatcagttcgtttaactggaacaaccataattgtatatagacctcgacgattaccaccaaatacatcagtaagcatttggtcacctataacaacagtttgatctggtctgatattcatcttagttattgctttatcaaacgctttccccattggctttctcgctttaaaaataaaatcgatgtctaaatgctgactaaaactagcaacacgagactcattattattagacacgattgtaatagtgattcctttttcattagcttccttaaaccatgctttaacacgttctgtaggttctttaacatcccaacctactagcgtattatctaaatctgtaataatacctttaacgcctttgtccactaacttgtctaaatcaatttgaaatattgattgaacatatgaattcggcataaaaaacttgcgaactaaacccatttaactcacctttacctttttataattgagacactaatgcttcaacagtttgacttgatgatacagctgctttttctaaaaatgcttcgaagctcatttccgcttctccatttgctaagtctgaaactgcacgaactacaacaaatggtacattaaattgataacatgtttgtgcaattgcagttgcttccatttcaaccgccatcgcatttggaaatgcttttttaattttttggcgttgttcaacactaccgataaagctatcaccacttacaattaagcctactttagctgttaattgttgttgttgtacaacttgagatactttttctattaaaggtttacttgattgaaatgctaccggcatctgtggtatttgtccatattcataaccaaatgctgttgcgtctgcatcatgatattttacatcatcacttataagaacgtcacctacatttaaactttcatctaaagctccagcagaacctgtattaataatgacgtccggtttaaacttattaattaataatgtcgtagaaattgcagcattaacttttccaatgccactttgggtaatcactacttctctatcttttaaaatgccagtataaaatttaacatgtgcaactgaaatttcgcttaattgtgttaatttattttttaatattgttacttcttcttccatggcaccaattataccaatcatcttttgattcacctcttttaaaaaatcctagcatttgttattttatcacattttaatcactacaacgacaagtatcatgattttcattactgtataaaacttttgctttatttttataaaaagctctttcaataacttggtatcataaataattatttttgaactcataacagtgaattcgatgcttctaatttgtctatttttcaaaaactaatcatatcaattacatcaaccaatcgtgtcaagaaactttattaaataacaggaaaatgatatgtttaaaataataatgatgaaataagaggattttacaatggctgaaaataatcaaaatagtctcgtaacaaagatagctacatacggcagttttattgcaattgcgtcgtttgtcattttatttataagtatatttttaaagttttcatttaatatcgagtttacagcaacaattatgaacatatgtcgctacactctaattctaggatttatacttatgtccttacctgatgttgttgataaaaacatcaagaaaattatattcgatgcatttattatcatcgtctttatcttctttttactatagtagttttattttgtaattacacagttaatcatatttgtttcgtatcgaattcctttgtgcattaaagataattctaatagaaaacagcagtaagacttttctaagtgttagcatccttactgctgtttttatttgtaacaacataatgacaggtactttatatttcactgtcaaagattattaatgattaacttaattaaattatgatttgaataaatagatatctaaatgcaatttgtcactattgatagttttattatcagcatacatttttaatacctcacgaccatactcaccatttaaattataaaaatcatattctacattttgttcatcatcattataatatttaacataccctttaacaatgtcgccaccttgttcgtacaacttatacttctcattcaaataatttcttaattgaacctctaattcttgaatagtaacaattttctttttcgtttttactgcagttagttctatttctgtttgatgtccgtcaatccataaattacaaggtatattcttataatcatcgtatttattattgtcacttaaagtaacaccaccataactacattgcgttttattggttgctcccccatgacatccgtatccataatttccagcaaatatatcgatatccttatttataaatttctttgaaagtgcctcattttcaaattcaactttaaaatcctttttccaatcatcatttacgaacatgtcatgaaataacaaatcatgcttcaacagtctatcgtttgtgtttttattttcaagctgagttggattgatgaatgacatcttagcattacttagacgctttgaatcaaacttacttttatgatgtaagtctgaatattcgattgcactcgctgaatttgtaaaaattccttctaacaataatattaaaataaatcctgttaaatatttaacttcaaactcccccaaaacaattattaatttacatttgagagcgagacataaatgataaagaaccgcttatggtttattatgtagtggttcttgagcctacaattttgattatgtatcacgctcataatacttttcaatttgaaatactctgttcgcaattattagttgagttatatcaaccaatacagtgtatacctaaaaattccaaaccgtttaacagtatataagaaaaaatgataatcatttcttttatttttattaaatttcataatgattcatataatattctcattaaaacatcacaatactgatacacaacaaaaagagcagtacatttgtcatgcaccactctcaacaaatatattttttcaatgaagcaattacgcgatcttacaaatactataagtatagctgatcacatattatatttattttataatcgaatttagaaattcatcacttatctcataaattgttggtctacttttaattttaactaagtagttatcatattttttaattgtattattaatttttactcttcctactcccaatatgttttctaaatcaattaatgttaatctatttcttttatttccaaacaatttatccattgaaaggagatacaaaaattcataatctatctgtttataatgactagttaaataaagcgttaatttttcagtcgcatccatttttggtattaactcatcaagtattctttcttgtcctgctatcaatagctcaagcattgtgtcaataaattccgtcaaatcaccacaattcaaatgatttgaagcagtcataaacgccttgtaatatttcgatttatttctatttataacatatgaaaatgtcaaagcagtataattatcataataatcactcaagagcttggcaattataaatcttccaactctaccattgccatcataaaaaggatgtatatattcaaacagataatgactagccatgattttgaacggctgaggcgcatcaaaatattttaaaaatgttagcatttcacctataaattcaacaattttggtttcaggttgtaacccaacatgtatatatttattcgttgacccatcatgcacaccgacaaaatttttacgaaatagctctccatctaacttatcttgttcgttaatttcatttgaaactaatttatcataaatcgctctaatgtctcttacattatcaactttaatttttttattaagttctatctctttatattgatccacgaggcctctgaacttaagaaattctgatgcttggttatttaacgcatgtgcaatctcttgtttagtactaaatacattttcaatttcattagtactttgtaattcatcgattaataaatcattaaaatattgttctctagctgcatatggtaaagaattaagtgctctatcaatttttctactattaattgatattaattcttgtttttttgatagatttttagtcaccataaagaatagaggatattccaaatcattaactttttttccattttccataggtatgatattaatattagtattgaaagaagctaaagaattaaatcttttaatatactcttccttcattttactttcattgtgttcatgaaaaatactttttaaagttctgtaacccatttgcagcctcctctactcatttaaaatgtattttttgtccaataaatcaattttcattagattagctaaatattatcactttttttctttaaaaactatataaataactattttctcaatcaatagaaaaagatttttcatcacaacaaaaagagcagtacatttgtcatgcaccactctcccttaaaatatatctaattatgctttataaatgaatcaccggaaatcaaaatatatcttgcctaatactaacaacatttacagtgatgctattagtcgaaatgtcttttaaaataactgaagtacttctttgaatgagaatatacctgtcaatattgtaacaagtactgcaacgataccaaagatgaacatccaatttgggtgtttataatcaccaacaattgatttctttttacttgcaatcaaaattgcacctaacgtaataggtaaaatccatccatttatcgcgcctgctataattaaaaggctgattggttttccaataaataagaaaatcattgttgaaataacgataaacacaatcacaattaaattacttctttcgttaagtgatttatgaagtgtttttaaaaatgttgcgcttgtgtatgctgagccaattactgatgacatagctgcagcaaataacacaataccaaaaatattctttccaattggtccaattgcgtgttcaaaaactgacgctggtggattttcagaacttagtgtcacacctgttacaacaactcctaataccgctaggaatagtaacgttctcataatacctgtagttaaaataccagcaattgctgattgatttacaaatggtaaatattgcttacctttaatgccagagtctaatatacgatgtgcacctgcaaaggtaatataaccacctacagttccaccaactaacgtaatgatgggcaagactaatttcattggatgttctggcgcaaatgtatgcacaaaagcatcaccataaggtggattagaaacaaacatcacatatgccacaactaaaatcatcacaataccaagaatcattgaaacaacgtccataattttttggccacttttacttacaaagattaatattgcaaagattgcagtaatagctgcgccccattttacatctaatccaaaaattgcatttaaacctaaaccggcaccagcaatattaccaatattaaaagctagaccaccaaatgcaatcaatattgagataacagtaccaagcccaggaacaactttatttgatatttcttgacctcttaaaccagttacaactaatatgcgccatatattaatttgtgcaccaatgtcaatgatgatagacagtaatatggcaaatgcgaaacttgcaaaaaattgtgatgtaaatactgctgtttgcgttaaaaatgctggcccaattgcagaagttgccatcaaaaatacagaacctaataataaccttttatgattttttgtgaattcaaagtcactttcttttttaagctttaaatttctccccatttttttagccccctataaggattgaatatcaatgccttctttcattaaaatttctctaattttcgaaacaaataataatgcatgttctccatcaccatgcacacaaattgtatctgcttgtaacgttacttccttattgttttttgaaataactttattttccttcaccatctttaaaacctgcttaagtgcttcgtcagtatcagtaatcacagcatcactttcttttctactaacgagctgcccatcatcttcgtatcgtctatcagcaaacacttcagaagctgtaattaatccgacattctttgcttctgaaattagatatgaatttgctaatcctactaacactagtgatggatcaaagtcataaacagcttgtgctataacgtttgctatttctctgtcttttgcacccatctgatacaatgcaccatgcggtttaacatgattaattttaacttgatgaatgcgacaaaacccttgtaatgcacctaattgataaatcatcaaattataaatctcgtcgttagagatatctatatttcgtctgccaaagcctttcaaatcaggtaaaccaggatgtgcacctactgcaacattatgtgctttggcaagttttaccgtttcattcattacattttcatcaccagcgtgaaaaccacaagcaacattcgcacttgtaattaacggaataatttgatgatcaccaccaaaggaataatttccaaatgcttcgcctaaatcacaattcaaatcaactcgcattataattccacccctttaacaatttgatgtttttctaaaaatttaatatcaacatcttttgcatctccatcacgatatagtggataatttaaaactgcatataaaaaatcggcagttgtagaaaatccatctatcaccatttcatctaaggtgactttcaacttatcaattgctgaagctctatcatgagattttacaattactttagctactaaagaatcataatatggtgaaacttgataaccgtgatatagtaaagaatcgactcgcacattaaagccttgaggtaaatgtaacgctgtcactttacctggtgttggttgaaatttcttttcaggattttcggcatttattctcgcttctatcacatgaccattaaattgaatatcgctttgtgaaaaaggtaaatgattatgttccaataaatacagttgtgctgcaaccaaatcacgttctgctcgcatctctgtaacagtatgttcaacttgtattcgagcattcatttcaataaagtaatgtgcggtatcagttactaaaaattcaatcgtacctgcacttctataatttgctgcacgtgcaactttaacagcatcgttacatatttgttgtcgtctttcttcagttaatgctgcacaaggagattcttcgattaatttttgatttttacgttgtacagaacaatcacgttcccctaaatgtacataattatcctgcccatctcccataacttgaacttcaacatgttttgcaacaggtataaaagcctcaacataaacacgatcatcatcaaagtatttttttccttcacttttagcttctttaaatgccttttctaaatcttcagctttctttacaatacgtatacctttaccaccaccgccactggcagctttgataacaactggataaccgatgtctttggcaagattctcaatttcagacacatgattcacagcaccatttgatcctggaatcacaggaacacctgcatgatgaactgtttgtcttgctgttattttatcccccatcatttccatcgtttttttagtaggccctataaacgctatgccttgttcctcaacggtttgagcaaattttgttgattctgataaaaagccatatcctgggtgaattgcattagcaccagtgatttgtgcagcagatatgatgcggtcaatatttaaataactatctaaagcattagcttccccaatacatatagcttgatctgctaaatgtacatgcaagctttgctcgtccccttttgcataaactgctacagtttcaatcccatattctctgcaagctcttataatccttacagcaatttcacctctgttcgcaattaaacaacgaagcatttacttaccccctttacttaatacgtaccaaaacttggtcgtattcaacatttgtgccatgatcagctactatttcagtaatttctccagcaacatctgttgttacctcgtttaatactttcatcgcttcaacatatcctataatatctcccttgttaactttgtcaccgacattcacaattggttcagttaattctttactatcttgtaaaaagaatgtacctatcattggtgatttaatgtcatgataatcatttgtcgaaacatcggagttatcattcgcttttgaagctgtcaaatcattattgttcatactttgatttgattgattactgtgtgcagccaaatgattcgagtcagtgaagtcaatttctatttcatcttcaaaatttttatatttaaatttcttaacatcattttccttcactaatttgattatttgttcgattttttcaatattcattttacaaatccccttttaaaattgttgctaattttttcgaagtatgtcgcaagctagatgtatcaaaaattggagtcttttgatgactcttaagaatttcattaaacagagacatttgttcccgattcttatctacagcttcttggaatgatatccatttaaattgaattgtatcttgtggtttcatctgtgctaactttggcagatcaaatttgcatacagttgcaattttggtataaccacctatcgtttgtttatcattaagcagaataataggttgaccatcatttggtacctgaacactaccaagagcaaccggttcagaaatgatatctgcttgattaattggtgcaacgctgtcaccttccaaacgatagcccatacggtctgattgttcagtaattaaatatggatgatttacaattttcgctctagcctcttcagaaaatgcctcgaattgaggtccttgaagaatgtgtataatattattttctggcaataaatcgtcctgtaaatgaatcgtctttccaatgttttctttaaagtcattatttattttcactgttattacatcatcagctaataactttctacctttgaatcctcctatactgcttcgggtatgtgttgcataactttcagcaatagaaggtacgttgatagaatgaccaaaagtaagataaccgcgtgcacctttggttatagcacctatttttaaaatgtcacctttctcagctaatatgacagaattcattgatatagttttattatttagcgaagcattaatactaccaccggttataacaaatgtattttgcgtattaaattgaatggtaggaccaatcaaagtatattcaatcgctggaccatcattgttaattaatgactgcgcaaccttaaaactaaattgatccatggcacctgcgcctgaaaatccaatatgttcataacctattcttcctagatcttgtaccgttgaaaagagacctggttgtaaaatcttaattgacattttcaatcaccacccagtcatcaacattaaagttgccatctgatatatctctttcgatttgtataaatttctgttcatctattgcataaaattgtatccattctcctgcttcgtacattgacattggttcacgctcgctgctaaatacttttaacggtgtgcgtccaataatttgccatccgccaggagaatctgatggatatagtcctgtttgattattcgcaatacctacagaacctgcatgaatttttaaccttggctgattacgtctaggtgtatgtagttgttcatcaagtccgcctaagtatggaaatcctggcataaatcctagcatatatattaaataaggtttacttgtatgtttttcaataacttgctcaacagttattcgattatgctttgctacttcttcaatatctggtccatatgtaccaccatattgaacaggtattttaataatacgattggtttgattcacagcatgaacatttttttcattaaatttgttaagttctaaattttcaattaatttagaagatgttatagcttgttcatcaaaatatattagaactgctcgatacgaagggacaatatcttgaatttctaatatttctttttctcgtatccaccgtaccattgctgtgacattacgatatgtctcttcggatattttattttcaaaataaatcataattgtctgctcgttaataaatcttacatccactttaaatccccctttgtattgcaataaaccagtattgaataccttttcattgtatcattgagaagcacaagttgtttaataagtaattcaaatcgcatataataacaaatgataatcaatttgttttctcggaaatattttgcttttttaaaatggagtagttaatattgtaactcttacactaatttaggttctgctatcattcggtctgatggaaaatttttacttttcatctgtccgattttttgattttgaatataaaaaagcacgaccgaagtatcattaacacacttcaatcgcgcaattaaataatctatttgatcatttattggatattaacaatttttacgttcatttcgccaccattaggtagtggaacacgaacttcatcatctaaacctttaccaattaacgctttagccattggtgattcatttgaaatcttaccattaaatgcatctgattcagctgaaccaacgatttgataactttcctcttcatcacctggtaattctacaaacgttactgttttaccaattttaacaacgttgttatctccagtatcttcaatgattaatgcatttcttaacatatgctcaattctttgaatatcttgttcgatgaatccttgttcatcttttgctgcatcatactcagagttctctgataagtcaccaaatgaacgtgcaactttaattttctctacaacttcaggacgcttaactgtttttaattcttcaagttcacgctctaatttttcaaaaccttcttgagtcattggatattgcttttgattttccatattgtcatcttcctttactgaattatactattgcttgctaactaaagactgaatttttgttgtcataatatctattgcaactttattgctcccaccttcaggaataattatatcagcatatttcttagtcggttcaataaattggtcatgcataggtctaacaacacttaaatattgattgataacagagtccattgaacgcccacgctctttagtatctcgtgttaaacggcgtaatattctcaagtctgcatctgtatcaacatatattttaacatccatcatatcacgtaataccttattttctaaagcgaaaatgccttctacgataataacatctttaggtttaaaatcaatggtaatgtcacttcttgtatgactagcataatcatatgtcggtacttctactgctttaccatttttcaagtctttaagattttcaattaataaatcattatcgaatgcaaatggatggtcataattggtttctaggcgctcgtcgaaagtcaagtgcttttgatctttataatagtaatcttgagcaagtaaagcgacactatgaccttctaagtttttcataatttcgttagttacagttgtttttcctgagccagatccaccagctatgccaatgattgtagtagctttcattagccaatttcctttctcatcatgttgtttggatatatcgggcgatccactttaatttgaacgatttgtaatggatggcgcgccgcgtctaagctgttaccttcttcatcataaattgcttctactacttgtgtaaatgtttcaatttctggaccaaagaattctatttcttgacctggtttaaagttatttcgttgttgaatagtcgcaatttttgtatcttcattatagtctaataccaaaccacaaaaatcaaatggtgattttttagattgttgttgaccaaacatctgttcttcataaccaggtgttccctcaaagaatgctggtgcagtgtctctatttgcacatttatctaactctattaaccattccggattaatcttaaagttgtcaggatctgccgcatacgcatcaatgactttacgatatactgagacaactgttgcaatataatgaattgacttcatacgtccttcaatttttaatgagtccacaccaatatccatcatttgaggaattgattcgattaattttaaatctttaggactcatcgcaaacggtgtaacttcaccttgattataaaaaacatcaagttcaccattatcatcaacttctaataattcataatcccaacggcaactttgacagcaaccgcctctgttggaatcccttgcagtcatatgattacttaatgtacatctacctgaataggcgatacacatagcaccatgaataaatgcttcgatttcaatatctactttttccttcatttcacgcatttccatcgcgccggtctcacgtgctaatacaacacgatccaatccttcttctttccaatattctacagctttgtaattagaaagtgattgttgagtagataaatgaatttcaagttttggcgcaacttctttacatgtttcgataattaaaggatctgcaacaatgatacctgtcgcaccagtcttttccaaattacgcaaatatgattctagaccttcaatattctcatcatgtgcaataatatttgtcgtaacataaattttggcaccgtaacggttcgcaaattcaacaccttcagctatttcttccatcgtgaaattatcagcatttgaacgtaatccatattcttgaccacctaaaaatacggcatcagcgccataatgtactgctatttttaacttttctaagtttccagcaggtgctaataattctggtttcttcataactgttttaggagttgatttaatctcttctattgtcttcatgattaacctccttaatatactgtttgtttatataagaaaccttcgtcaaatggtcgatgatcaggttgaatttcttcaattggatccatcaacataaatttctcatcttcatagatttcaggatcttcattgtacaaatctatcgcttgacgatactgttccgttaccacattaatatattcttccgtttgtagaataccatcgattttaaatgaatctatacccgcctcaaaaaatggtgctaattcttcaattaaacaaatgtcgtttggtgacataatgtgcgtaccattgtaatcttcgtaaactgggtaattattttgtctttcttcatcataaagtaataaagattgttcatcattgcgacgttcaattttcatttggcgatcttggaacgtataataattgcctagtagcatacgctttgattgaaacatacaagtcattccttgaacttgcacctcaatttccacatttgaattttcttttatattaataatttcatccaaattcagctcacgtgctaagacagctcttgatgcgcctcttttaccccagtaattacattgaaaatgattagttactaacgtctctgcattccaatgaagtggtattggattttcttgcgccttcacatacattactactgctggatccccgaaaataattctgtcaactcgtatttcatgtaaaaaattaatataatcttctacagcatctaaatgataattatgaaataatccattcactgccgcatatacttttttatcgtttttgtgagctaatgcgacagcctctgtcatttgttgtctattgaattcccctggaagtcttaaaccaaacttttgctcgccaattacaaaagcatctgcacctaaatcaataagtgtttccatatggcttaatgacttgggtgtgacaagtaattctgtcatagtcattctcctttaattgaaatcgctaatccatcgtctatatttaaaaaattcgttgtatatcctggttgctttattaaccactcattataatcttgaacctttttaaccatttgtcttacatttctcgatctaacaatcccaatatccgatacaaaaccgtgatataaaacattatctgtaattacgagaccttggtgctttaaaagtggtgtatatatttcaaaaaatttctttgattgcgcttttgctgcatcaataaatatcatatcataaactttgtcatttacattttcaaattgctctaaagcattaccttcaataattcgaacctggttttcaaaatgataagtagctaaattttgtttagcatattgaatcatcgtttcattacgctctatcgttgtgacatgaatgtcatcagatatagaagcgaattgcatagaactatagccgattgctgtaccaatttctaaaatatttttaacattattcatacgaattaattgcttaattaaatctaatgttaaacgatctacaattggcacttcatttacctcggcaaattcacgcaaaacttcgattgaactattttgatgttgatgtaaatctattaaatattttttatttaggtcatccatgttttaaacttcctttatgtaaaataagtcaatatgattatgacaataaaataaatcagccttcacaattgattataattttgccaaccaattaaatgactgatttcgtgttagacgcaaagctattttatttatagaagcgaatcattcatataaaatttaactttagatattttaccatattttcaataaaattataagcgttaattatttatacattgcttgacttaaaaaatactcttgcctccccatctttaaggttagcaagagtaaaatctttttaattattcttccatttcagtatttacaacttcttcaatcatgtcccattcttcatcagtttcgattggtactaacttaccaccgtcacctgactcatctggttcattgatcattggtacaagctcaatcatatcgtcttcatctgattgagcaccttcttcagctaagataacatactcttttttgaattcaggatgataaaattctaaaacttttcggtataaaacttcatttccctcttcatcgaataaagttaataattcttcttcgttattaatttctagttgtgaatcatgattatgttcagtcatagtaaaatctccttttaatgtagtgaatctaaatagccttgtaaaataaataccgctgccattttatcaatcacttgttttcttttttgtcttgaaacatctgcttctaataatgatcgttcagcagccattgtgcttaatctttcatcccacatcacaatctcaatagaaggataagcttctaataatttttctttatatgttaacgaagcttcgcctcgaaatcctattgaattattcatgtttttaggtagtcctattacgactgtacccacattatgttttttaataatgtctactaattggtcaatacctaattcattattttcttcattgattcggagtgtgtctaatccttgtgccgtccaacccattatatcactaattgcaattcctaccgttctactaccgacatcgagtcctaaaattttatgttgtaacataaattatttattttgctcttttaaatagtaagaaacaagctcttccataataacatctctatcaatatgacgaatttgatttcttgcttcattttggcgtggaatatacgcagggtcacctgataataaataacctacaatttggtttacggcattatatcctcgttcatctaatgttcgataaacattatttaaaacatctcttacatcttgcgttggaagttcttcatagtcgaatttcattgttttatcaaagttttccatttgcgacactcctttaattacaaatataactcactatcatcatacaatattatggctttaaattatagatttttaatgtaatctttaataaagcttaatgattttgagatattttcaggttgtgtaccgccaccttgagccatatctggacgaccgccacctttaccaccaacgattggtgccatttgtttgataagatcaccggctttaacgttatttgttaaagatttagggacagttgcaaccatcgatactttatcatcaacattacttgcaagaatgataattgtatcttgtagtttagatttaaaatcgtccattgtcgagcgaattgctttcgcatttggtacatccacttcagtaaccaatactttatagccattgatttcttcaacttgatcttcaatattacccattttaagtgatgtgatttctttgtcacgttgctctaattgttttaataatgctttttcttcatcttgtaattgtgttaacttatcgactacttgatcatcagatttcactttcagctgtgatttcatcgtattaaatttctcttgaatatcttctaaatataagaaagctgctttacctgttaatgcttcaatacgacgcacaccagctcctgtacctgactcacttactattttgaataagccaatttcagaagtattgcggacatgaataccaccacataattcaattgaaaatggtgccatatttactacacgcacaacatcaccatatttttcaccgaataatgccattgcgcccatttctttagctgaagcaatatccatttcttgaatgttaacgtcaatacctttccaaatttcttcatttactaagcgttcaacttgatcaatttcatcattagtcattggaccaaaatgagagaaatcaaaacgtaaacgatctgcttctactagtgaaccagcttggttaacatgatcacccagtactgatttcaacgctgcatgtaataaatgtgttgcactatggttcttttgaatgtcacgtcgatcattttggttcacttcagcagacactgtagcgccaacatttacttggccaaattgtactactcctttatgcaagttttgaccatttggtgctttggttacttcactaacagcaatttcaaaattgtcattataaacaatacctgtatccgcaacttgtccaccactgattgcataaaatggtgtttccgttaacatgaagtatactgtttcacccgcttcaacttgtgaaacttcttcaccattgtatatcaagtgtgttagtgttgtttgagctgtcgcagtatcataaccaacaaaagtacttgcagatgtaatatttttcaatacttcactttgaacttgcattgattgagaattttgacgtgcttgacgtgcacgatcacgttgttgttgcatttctgactcgaatgttgtcatatcaactttcaatcctgcttgcactgctatttcttcagttaattcaattgggaacccatacgtatcatacaatttaaatgcatctttcccattaatttcatttgttgtcgctttagcttttttaattaattcatttaaaatcgctaaaccatcttctaatgtttcatggaatcgttcttcttcagactttataacacgcttaatgaaatctgctttttccttaacatttggataatatggttccataatgtctgcaacaatatcaacaagtttgtacataaatggctcattgattcctaacgtttgactaaaacgaacggcacgacgtaacaatcgacgtaatacataccctctaccttcattggcaggtaatgcaccatcagaaattgcaaatgcaatcgtacgaatgtggtcagcaattactttaaatgccacatcttgttcgttgtttactaaatattgtttacctgatactttttcgatttcattcattataggcataaataaatctgtttcatagttagtacgtacattttgagaaactgaggccatacgctcaagccccatgccagtatcaatatttttattaggtaatggtgtgtaactatgatctttattatgattgaattcactaaatactaagttccatacttcaagatagcgttcattttctccacctggatacatttcttctgccggatcgtcttgtccatatgcttctccgcgatcatagaaaatctcagtgttcggtcctgaaggcccttcaccaatatcccagaagttaccttcaatgcgaataatacgactttcttcaagcccaatatctttatgccaaatgttgtatgcttccatatcttccggatgaatcgtaacgtacaatttatctggctccatacccatccatttatcactcgttaaaaattcccaagcaaattcaatcgcttcttgtttaaaataatcaccaattgagaagttacctaacatttcaaagaatgtatggtgacgcgctgtgaaaccaacattttcaatatcatttgtacgaatagctttttgagagtttacaattcttggctttttaggtgtttcacgtccatcaaaatatttctttaatgttgctacacctgaattaatccataataatgtatcatcatcaattggcactaatggtgcagaaggttcaaccatatgtcctttttcaacaaagaaatctagatatttttgtctaatttcactcgcttttaactttttcatcatttacacatcctatttactgtttttaaattaccattccataaaaattgatgacacagatagtcgatttgcaaaactagtataaatcaatatcattttttattattaaaaaataaaaaacgcccatcctcaaaagggacgaacgttatcgcggtaccaccctagttataaatgcaattcaacacatttatcactttaattcgactatacagttgtgcataaagtagcgttcactaatgtttgttgtacttttcaccaaccagtacatctctgataaacaaatcattaactactcatctttatacgaatttaattctattttagttacatttacgcttgttgtcaacgttctataaagtcatacggcgtgatttctcccatattaatcattgggtcaattttaaacattgtagcttccgttaatacatttgtatctgtttttgttgaatcagacataacttcttcactatcattcgatgacattggcgcttctacttgatcatctattgtcgtttgtgaagctcctgtatcattagttgctgtgttttccagcatttcttcatcttctgaattaaaataatttttcaacaatgtacataattgtgttaaacgcgcttgaccatttgttttcaatccaatatcaaatgcttccggatcaccaagtaaaactaaactcgttttcgctctagttaaaccagtatataatatcggtctttgtaacattctaaaatactgtttaacaataggcatgataacaataggaaattctgaaccttgtgatttatggattgatgtacaataagcatgtgttaattccatcatatcttgtttcgtaaatgtaatttcattaccttcaaaatccacaacaagtacatctttattaagggcattttctttcgcccaaaaaataccaacaataactcctatgtcaccattgaatatgttatcatttggcctattaacaagttgtaatactttgtcaccttttctaaagactacatcaccaaactcaatttctcgtgtgtctttctttttagggtttaaaatatcttgtaaaacttgatttaaacgtttaataccggcatttcctttatacattggtgcaagcacttgaatatcagccatagtataccctttattaacagcactagtaactaccttctcaacaactgttggtatttggtttgcctgacagttaataaaacttctatcatgaaaacgctgtgtaatatcaattttctgacccaacttcattcgatgtgctaattctataatgcttgaaccatcttgttgacgatatacttcagtcagatttactcgtggtatagctttcgattcaattaaatctttaaatacttgaccaggacctacagaaggcaattggtcctcatcacctacaaatatcaattgtgcatctaaaggaactgcacttaaaaattggtggaacaaccaagtatctaccatagacatctcatcaatgattatgagtcgtgcgtttatttcattttctaatatatcctctggctttgtgtcttgattccaacctattaaacgatgaatcgtcattgcttctaatccagttgactcttgtagtctcttagacgctcttcctgttggcgctgctaatacaactggataatcatcattgacataatcatcataatctaatgataagccatgaatctcagcatataattcaacaatacctttaattactgtcgtttttcctgttcccggtccaccggttaatagcatcaccttagaattgatagccgtttgcaaagcttctttttgtgaagctgcatagttcacttgattcgcatcttctatttcaccaatatgcatttgtaaatctgactgttcaatttctgtaagtttatttgtatgcgtctttattctgaataagttttgaacacttttgatttcagaataatacaaacttggaattgcaacttgttcattgtcaataattagtcgtttttcctcatttaagtattgcaacatttcgtctaatttttcaggttcgatgacctcttcatcttgataatttaatacatcaaccgttaaatctataacaacattgataggcaaatatgtatgtccctgtttaatacattcttcttctaacgtatagagcaacgcagcttttaatcgttcattatcgttataagcgataccaatatttctagcaagttgatctgctttattaaaaccaatacctttaatatcataaatcaattgatatggatttcgatctaaaatagtcagtgtatcgccgagataaaactgataaattgccattgaaagtttaggaccaaaccctaaatcatgtaaacgaatcattattttttcagattcttgatttgctgaaatttgttctgcaatttgtttctgtttctttttagataatcccgaaactttttctagcactgaatggtcatctaatatatcatttatcgcattgtcacctaatgtattaacaatattttgagctgtctttttacctacacctttaaacaaatcactagataaataacttataattgcttctttcgtttgtggcatttctttttcaaaagtctctgcttttaattgtttaccataacgtggatgatcaacaacttgccctttaaatgtgtagacatcgccttcaacaatattcggaagaaaccctacaacagttggcattgtatcaaagtcttcatttgtttcaatagtatctactttaagcactgtataaaaattatcactgttttgaaacaatatcgcttcaacagtacctttgatcattgaataatcaaatagtgtagggtctgacatgttactcctcctctttcattttagtgaatgttttcagcgcatgctgacttaataagtgtttagggtcgatagtcacagcttctttaaaatgagttattgcttcatcaatatcttcatttttcataaataacgctaagcccaaattgtatcttgcatcaacatgatttttatcaatcgttaatacatgtttaagttgagttatggcttcattaaacatttctaattgacataatacaagaccatattgaaattgaacttctgcatctttgtctttatctagttccgcagcagtcattaaatacggcaatgccagcttaaatgattctaactgattaaacgccataccgatcatataattacaatcaacttgttcaatctctgtttgtaatgcttgttgatataatttaatagcttcttgataacgttgctgattataatatacatttgctagattaaaaaatacgacgccattcttcggatctattgttaaagctttttggaaaaaacgctctgccttttcaatctcattcgcatcagcaagtacgataccagcattaatataattttcaataattgtaggattttcttcgatatttccgaacaatgcttgtaacgcttcttctatttttccattttgtatgtattgataaattgtttgttgatctatcatttacgaacctcatttctcatcaattataacatcttgataaattgtatgtctcgaatcacttaacaacgaataaaatataatctaatatcatcttcattcatgaaaaagcgggaatggaatagaaatgcttaagaaccattaacggtttattatgtaatggttcttccacattagccaccactattatgtacttaaaaataagaatacataattagattcatgcatagggagtgggacagaaatgatattttaacaaaattaaattcgttatccccaactggcattgcctgtagaatttctttacgaaattctctatgttgtggtcccgccaatataacattgtagagcctaggacattgtgatgtcccagactctatcctcatgaattattctcatcaaaaactgtctttcgtcattttcaacgttgaaacttcaaataagtaatttattgttgccattgtttatacaacataatttaattgaccttcatttttgaacacatcgtcaattgttgcaccaccaagacacacatcaccttgataaaaaacaactgcttgtccaggtgtgattgctcttactggctcagcaaaagtaacacgtagtgcatggtcgttttcacgtttcacaaaaactttcgtatctttttggcgatatctaaatttagctgtacattcaaaaccttgatctaagtcattatcttctggatttacaaatgaatagtctgaagcaattaagtaatcactgtataatgcatcgtgatggaatccttgttctacatataaaacattatcttttaggtttttaccgacaacaaaccaaggatcgccatctccacctatacctaatccatgtctttgtcctattgtgtaatacatcaaaccactatgtttacccattttcttaccatcaagtgttatcatatcacccggttgtgcaggtaaatattgtgataaaaatgttttaaagtttttttcgccgataaaacaaatgcctgtagaatcttttttcttagcagtaacaagtccttgttcttcagcaattcgacgcacttcactcttttcgatgtcgccaattgggaacatcacttttgaaagttgttgttgagataattgattcaagaagtatgtttgatctttattattatctacaccacgtaacatttcaacatgaccatcttcatgacgatgtatgcgtgcgtaatgtcctgttgctacataatctgcacctaaattcatcgcatgatctaaaaggctttaaacttaatttctttattacacataacgtctggatttggagtacgaccttttttgtattcatctaagaaatacgtaaagactttatcccaatattctttttcaaaattaacagcgtaatacggaatgccaatttgattacacacttcaataacatcgttgtaatcttcagttgcagtacatacgccattttcgtcagtgtcatcccagtttttcataaatatgccaatgacatcataaccttgttcttttaagacgtgggctgttacagaactatctacaccgcctgacataccaacgacaacacgtatatctttatttgacaattatgactcctccttaaatttaaaatatattttatgaatttcagctacaattgcattaatttcattttcagtagtcaattcgttaaaactaaatcgaatcgaatgatttgatcgctcctcatcttcgaacattgcatctaaaacatgcgacggttgtgtagagcctgctgtacatgcagatccagacgacacatagatttgtgccatatccaacaatgttaacatcgtttcaacttcaacaaacggaaaatatagatttacaatatggcctgtagcatccgtcattgaaccatttaattcaaatggaatcgctctttcttgtaatttaactaaaaattgttcttttaaattcattaaatgaatattgttatcgtctcgattcttttctgctaattgtaatgctttagccatcccaacaatttgcgcaagattttcagtgcctgcacggcgtttcaattcttgttcaccgccaagttgaggataatctagtgtaacatggtctttaactagtaatgcaccgacaccttttggtccgccaaacttatgagcagtaatactcattgcgtcgatctcaaattcgtcaaacttaacatcaagatgtccaattgcttgaaccgcatcaacatggaaatatgcatttgtctcagcaataatatcttgaatatcataaatttgttgcactgtgccaacttcattatttacaaacataatagatactaaaatcgtcttatctgtaattgtttcttcaagttgatctaaatcaatagcacctgtatcatcaacatctagatatgttacatcaaaaccttctcgctctaattgttcaaaaacatgtaacacagaatgatgttcaatcttcgatgtgataatgtgattacccaattgttcatttgcttttactatgcctttaattgccgtattattcgattctgttgcgccactcgtaaatataatttcatgtgtatctgcaccaagtaattgtgcaatttgacgtcttgactcatctaaatatttacgcgcatctcttcccttagcatgtattgatgatggattaccataatgcgaattgtaaatcgtcatcatcgcatctactacttcaggttttactggtgtggtcgcagcataatctgcataaatttccatgtttggacactcctcacaattttatcaatgttccaataatagcaccttacatactatttttctacttttctgtttaactttatttataatgtttttaattatattttaccattttctacacatgcttttcgataggcttttttaagtttatcgctttattcttgtcttttttataaattttagtatttgcagatatttttttatttgtaaaatgtaacgtactattattttggttatgagcaatttaatatttatctggttattcgattggtatacttcttatatcataaaaaaggaaggacgatataaaaatggcgattaaatattcagcattaaaccttgtccctattcgagaaggtgaagatgaacaaacagcaattaataatatggttaatctcgcacaacatttagacgaattatcatatgaaagatattggattgctgaacaccataacgctcccaacctagtaagttcagcaactgctttattaattcaacatacgttagaacatacgaaacacatacgtgtaggttctggaggcatcatgttacctaatcatgctccattaatcgttgcggaacaatttggcacgatggcaacattatttccaaatcgtgtcgatttaggattaggacgtgcacctggaacagatatgatgaccgcaagtgcattaagacgagatcaacatgatggtgtttataaatttccagaagaggtttcattattacaacaatatttcggccctgctcaccaacaagcatatgttcgtgcttatccagcagtaggtaaaaatgtgcctttatacattcttggttcttcaacagattctgcacatttagctgctcgcaaagggcttccatatgtgttcgctggacattttgcacctcaacaaatgaaagaagctatcgaaatttacaaaacgttatttgaaccttctgatgtattagacgaaccttatgttattgtatgtttaaatacaatcgttgctgaaaatgatgacgaagcacaatatttagcttcatctatggcacaagtaatggttagtatcactcgtggcagaatgcagcccgttcaaccgccaacacatgaactacaaaatatattaacgccgagagaatacgcgatggctatggaaagacagaaaatatcattaataggttcagaaaatactgttcaacaaaaaattcaagattttatggaaacttatggtgaagtcaacgaaattatggcaataagttatatttatgataaagatatgcaattagactcttatcgtcggttcaagaatgttataaatcagataaatgaaaaaaacactttataatgtgataaataaactaagtgaaagtatgtatccataatattaataaaaatatacagtaacagcattttgaatgaaagatgtctttattgttcaatcatttattttagtaatgattcaaattcacttaaaattctaatgcaaatatgaaagcgccccttcaactttacactgtgtaagtgtttatttgatggggcgctttcaaaatattgaaaagcatatccaaaatttaaagaaatttatttctctttatcttcattttcttttttctcttcgttattcgatcctgtatattcatttatcttatcttttacatttttaacttgttcattatcgctatttttaaatttttctactgcgtctttagctttatccataaaactcatattaatcgctcctcttatatttgattagtttaattgaacttattttttaagtttatcaattgcatcagttattttgtttttagcattttcaacaacttcttttgctttaccagtcgctttatcttgctgaccttctttttctaattctttgttatcagtaacgttacctactgtttctttaacatttcctttaaattgatcgaacttactttcgtctgccatagtgaaacctccttggatgtatatatttatataccactaaggaggttcgctaaacattataatatgaagtttttatgttatagtatagtatttatacgattaaatataaaacatgtatccgtctaaatcttcacttgtatctacatattccgctaaatatttcaatgttgtattatctaaaacatctctcactgcatctctcatgcgaatccatagttgttttttgcgcaggtggttctgattcaatactttcaacaaatgtaattggaccttctaacagtcttataatatcccctgctgagatttcttccgctggcactcttaattggtatccacctttagcaccgcgtacacttcgaattaaccccgcatttcttaaaggacctacaagctgttctaaatataaatcactcaaattattttcttcagcaattgactttaatgatatacatccttgcccctcttttttagcaagagaaatcatcaatgtaagtccatatctccctttagtagaaattttcattgtataacctcacttaattcgaatattgatattcccattttagcattttttgagttaagatagtataagaaaggtgtgacaaatgtgagtacagaaccattagcatcgagaatgcgcccaaaaaatatagatgaaatcatttcccaacaacatttagttggaccaagaggcattatcagaagaatggttgatacaaaaaaattaacttcaatgattttttatggtccacctggtataggcaaaacaagtattgccaaagcaatttcgggcagtacgcaatataaattcagacaattgaatgctgtaactaacactaaaaaagatatgcaacttgttgttgaagaagctaaaatgtctggtcaagttatcttgttattagatgaaatacatcgactagataaagctaaacaagactttttattacctcatttagaaaatggcaaaatcgtcttgatcggtgctacaacttcaaatccttatcatgctatcaatccagcgattcgttcaagagcgcaaattttcgagttatatcctttaaatgacgaagatgtgcgccaagcgttaactcgtgcaatagaagatgatgagaatggtttgaaaacatatcaacccaaaattgatgaagatgccatgacctacttttctacacaaagccaaggtgatgttcgtagtgcgttaaatgcattggaattagctgtattaagcgcagataatgacaaagacggttatcgacatgttacattgcaagatgctaaagactgtttacaaaaaggtgcatttgtaagtgacaaggatggtgacatgcattacgatgttatgagcgctttccaaaaatctatccgtggtagcgacgtcaatgccgctttacattatttagcacgattaattgaagctggagatttacctacaatagttcgacgattacttgtaattagctatgaggatataggcttagcctcacctaatgctggtcagagaacacttgctgctattgaatcagcagaacgtctaggtttaccagaagctagaattccactaagccaagcagtaatcgaactatgcttatcacctaagtcaaattcagcaatgagtgccattgatagtgcattgtccgatattagaaacggtcatgtgggccaaattccaaaccatttaaaagatggacattatcaaggtgctaaagatctaggccgatctattggttacaaatatccacaccaatatgttaatggctatgtttcacagcaatatttacctgataaactaaaaaacaaaatttattacgaaccaaaaacgacatctaaaagtgaacaacaactcaaagaaatatataacaacttacttaaacaaaggccgtaaaaataagattaaatcgattacctttgatattttagctataatcaaatcaaaactgactagtacacgaggcatattctactatgcttgcgaactagtcagttttagttttatggtgtggttacacttgccttacgttgaaaattatccctttcaaaatgaattattgccctttgtctttaatgcgacgaactggaatatcttttaatacgtcattcaccacataacttgcacaaattaatccaacaacacttggcacaaaggcatttgaagaaggtggcatttgtccttttcgattgatagcatttttatctccaactatatcttttacatcttctcttatgacaattggactttcatctgaaaatacaactggaatccctttacgaattcctagttttttcaatttttgacgaataattttggccattggatcggtatgtgttttagagatatctgaaattgtaaaacgtgttggatctgttttatttgcagcacccatactggaaatcactttaatccctcggtcaagacactctttcattaagtgtactttgtacattattgtatcacttgcatctacaaaataatctatatcgtagttatcgaaaatttcttcatatgtctcttctgtataaaacatatgtaagggcgtgactttacaatctggattaattaatttaatacgttcttccatcaaagaaactttactttgtcctaccgttgtagttaaagcgtgtaattgtctgtttacatttgtaatatcaacatcatctttatctattaatataatatgaccaatattcgttcttgctaatgcttcagcagcaaatgaaccaacacctccaacgccaagtatgacaacagtttgttgcttcaataaatctaaaccttgttgtccaatcgctagttcatttcttgaaaattgatgtttcattattttacctctttcactgatttatacataagtacatagtaacttaaaattttatatttagcattatcactttgattattttcccaaaattcaacgaggaaacatttattaaacgctataaaacccaactaattctttattaaaaacttaaagaaacgcataaaaatacgcaagacaaagtcttgcgtatcgatagagtccgtattgccgtagttataatagcttgatcattcggcctgttatatacaggtgggtgccctgtttcttgttttgtacgtccttcatataaggcgtgtacgctgcaagaaaacccattgggctcccttgatcaaagagtgttaggcccaaattaaaaagcaaacttacgaacaactcagatgactatcttatgatgttatattaccacataattaaaattaatgaaattataacaaaccaaagtttattgattttttaaaatttagtgacgaattcgcaaagaaagttcttctaattgtttatcagaaacttcactaggcgcattcgttaataaacatgtagcagatgctgttttagggaatgcgattgtatctctcaagtttgttctattagtcaataacatgactaatcggtctaatcctaatgcaataccgccatgtggtggtgcaccatatttaaatgcatctagtaagaagccgaactgttcttgtgcttgttctttagtaaatccaagaacttcgaacattttttcttgtaactcaccatcatgaattctgattgaaccgccacctaattcataaccatttaatactatgtcataagcatttgcctcagcttcttctggcgcagtgccaagcttagcaatatcagcttcttttggagatgtaaatggatgatgtgctgcaacgtaacgtttcgcatcttcatcatattctaataatggccaatctgtcacccataagaagtttaattttgtttcatcgattaaacctaattctttagctaatttgacacgtaatgcacctaaactttgtgcaacgacatttggtttgtctgcaacaaacattactaagtcaccagcttcagcaccagttaatgtaagtaatgtttcaacattttctgtttcaaagaaacgtccaattggacctgtcaaaccatcttccacaactttaacccacgctaatcctttagcaccatagatgtttacaaattctgttaaagcatccatatctttacgagtatattgttcagctgcacctttagcgacaattgctttaatttcaccatcattttcaacagtatctttaaatactttaaagtccatatcacgtcctaattgagaaacgtcaattaattccatttcaaaacgtgtatctggtttatcagaaccatagcgacgcatcgcttctttatatgtcatgcgtgggaaagcgccattaatttcaacgcctttaacttctttaacaacttttttaagcatttcttcacccatttgcatcacatcttcttggtctacaaaactcatttcaatatcgacttgtgtaaattcaggttgacgatctgcacgtaaatcttcgtcacggaagcattttacgatttggtagtatttgtcaaatccactaatcatcaataattgcttaaataattgtggtgattgtggtaatgcataaaattcaccatcatgaacacgagatggtactaaatagtcacgtgcaccctcaggtgttgacttcgttagtactggtgtttcgatgtcaaagaacccttcatcatccaaatattgacgaatagaacgtgtaatttgatgtctcattttaaatgtttgcgctaactcttgacgacgtaaatctaaataacggtattttaatcgaatattttcatcaacgttaacattttcttcatttatagaaaatggtggtgtctcagatttattaatcactttaatatttgtaacttgtacttcaacttggccagttttaattttaggattaactgtttcagggtcacgcttcgtaactgtaccttgaacttctacaacatattcagaacgtactgtttcagcaattttcaatgcctcttctgaaaatgcaggattaaacacgacttgtacaattccttctctatctcttaaatcaacgaaaatcaatccaccaaggtcacgacgattgttaacccatccttttaatgtaatttcttgtcctaaaaatgcctcagtaactaatccacaataagttgttctcttactcatattttaacgccctctctacttcttaaaatattcgactaatgcgtctaattcaattgtttcagattcaccagttgtcatatttttaacatcgattttattattttctaattcttgatcaccaataacgattgtaaacttggcacctaaacggtctgcttgtttcatttgtcctttaattttacgctgtaaatagtctttatctgctttaataccattatgtctcaaatgatttaatagcttcacagcatatcgatctgcttgatcacccattgtaacaatgaataaatctaagttttcttcaatatctaattcgataccttcttcttcaagtgcaagcaataatcgttctatacttagcgcaaaaccaatacctgtttcacttggaccatctagcaattctaataaaccattataacggccaccaccacaaagcgttgtaatggcaccatcatagttagggttatccatcattaattcaaatgctgtatgtgtataataatccaatccacgaactaagttaggatcttcaatatatggaatacctaaatcatctaaataagcttttacttgttcataatatgccttagattcctcatttaagaaatcagtgattctaggtgcagtcttaatcgcttctttatcacggtctactttacaatccaaaattcgcatcggatttgtatgcaaacgtgattgacaatctgaacaaaattcatgaattactggttcaaagtgtttcactaacgcttcgttatattcttttcgagacgccatatcccctacactattaataacaagctttaaatgttttaatccaaatgattgataaatatgcataaccatagctaatacttctgcatctacgctaggattttcagcaccaatagcttctacaccaaattgattaaattgacgatagcgtcctttttgcttacgttcatatctaaacatcggtccattgtaataaagtttaattggttggtttggattaccttgcattttatgttcaatatatgaacgcacaactgcagctgttccctcaggtcttaatgtaatacttctatcgcctttatctttaaatgtatacatttctttttgtacgacatcggttgaatcaccaacacctcttgcaaaaagatctgtactttcaaaaattggtgttcttatttctttataattataaaatgtcattaattcatctaattgattttcaatgtaacgccatttctttgaatcttcaggtaaaatatcctgcgtccctctaggtattttaatcattttgacatctccctcggcaaactattttatttaattacctttttaaaactaaaactatatacgaccacttaactttgcacgataaatcataatcttaaaagcaaaagaaaaagcccttgcacagcctgaaactgcacaagggacgaatatccgtgttgccaccctcattggtttaaaaaacatgcctaattgtaatcatcattactttttataagcgtgcatttaataaacccactcaaaacgtttaacgtacgtttaacggctttacttttcataaagcacctcttcttgtgttcaatgtatataaactactcagcataatctttcagtctatggattatattcctacacaatcttagttagattgctacctatttcatttaccatttcaagaatactaacggttttagttataaaattcaatatcaatgataactactttcacatatttttgcaagccctacgcagaaaaataaattttaaggccatcaacaattgcttgttctaaaatttgtctatgtaattgatctttaatcatcgtttcatcagttgggttactaatataacctaattctaataaaacagcaggaacttttgtttgtcttaacacttgataattttcttgtcttgaaccgcgattagaaagtagacctttcttctgaatcgtagcgtctaacgtatctgctaaagctctttgattatcatgataccaataaactgtcattccatttgcattagatgattctaacgcatcattatgtatactcaaataggcatcgcctttgatatcacgattttctagtgaaacatatgtatcgtctgttcttgtcatcttaacagttgcgccttctttttctaaagtacgctgcaattcttttgctgttttcaacgtataatctttttctaaacttttatatttagtattgcttgaagcaccctggtcactacctccatgaccaggatcaagcactattgttttaccttgcaaaggatttttctccttcgtattatccgcgacaatatctaaatttgtgtgccatccagctatccaacctttttcattactggatgtatcttcaacttcaatccatttacctactttaccaatctttttaaaatggtcacctttttcaactttatatatgactggatacgcagcgtttggacctgtacgtaattcagcattttcagttatcgtgatgttcccactatcttcactattgctattcagcaataaaaataaaaagatgataaataagacaaaggcaatcactactattagagtacgtttatttttaagaccctttttagataaccatgcctctatttttttcattgaattttgccgtcctgactttcataaataatagtgactggaccatcattatttatgctaacattcatgtgtgttccaaattcacctgttttcacagtaagaccatacgctcgtagcgcatcattaaaatactcataaatttttaccgcttgatcaggatttttagaatttgagaaacctggacggttacctttttttacatctgcatagagagtaaattgtgaaactgatagtatttcaccattcatttgttggatattaaagtttaatttattattgtcatcttcaaataatcttgcattagcaattttctttgcaattacatctgcatcttgctctgtagagttctgaccgataccgactaataaacaatatccttttttgatttgattatttaatgtatcattcgtcaccgatgcttctttaactctttgtacaactactttcatattttgcacctctagttccaaactcttgttactgtataaacatcaccaagttgtttgatcttttctaccacacgataaacatcattcacgtttttcaccatgacactaatatttattattgcatttttatcaatatctgaacgtcctgaaactttaattaaattgccggctgtcgagctaacagcttgtagtacttcattcaacaagccatttcggtcatacgcagttacctctaaatcaacctgatatttttgagttgcgtcttttgattttacccattcaacattaattagtcgttcagtttcgttcttaatatttgggcaatcagtgcgatgtactttaataccgtgacctttggtgatataacctacaatatcatcacctggtataggattacaacattttgacaacttgataagtacattttctaaaccttctacatagacaccactatcagtaatgatgttgtctttaataggcaatgatttcgtaacttcttgtgcttcatttaaagcacgttgtttatctaaaatacgttgtctttcagttaatttattaacaatctgtaaggatgtcacgccgccaaatcctacagctgcgaataaatcatcttcatttgcaaagttatatttttcattaacaacctgaatatttttctctgtcaaaatatcttcgactctaaatccttgctcttttatttcagcttcaaccatcattcggcctttttcaatattagatgaacgatcttgttttttgaagaaacttttaattttacctttggcactagacgatttaacaattttcaaccaatcacgacttggtccatatgaatgtttactagtacgtatttcaacaatatcgcctgtttgtaaaatatagtcaattggtacaattttgccattcaccttggcaccaatcatcttattacctacttcactgtgaatcgcataagcaaaatcaatcggcacagcaccatatggcaactcaataacatcactcgctggggtaaatgcgtatactttgtcactctgtaagtcatattttaaggtttccataaattcttgagcgtcagacgatgtatgatccgcttcagctaattcttttaaccaatttaacttattttgataagtttgatctttttcacttacttttttaccttctttgtaagcccagtgtgctgcaacaccatgctcagcaatttcgtgcatatcaaacgttcgtatttggatttcgagcgggtctccatttgggcctactactgtagtatgcaatgactgatacaaattttgtttaggcattgcaatataatctttaaaacgtcctggcatcggtttccataacgtatgcaccaacccaagtatcgcataacaatcattaatagaattgacaataacacgtatcgccaacaaatcaaaaatttgatcaaattgttttttctgcttcatcattttccgataaatactgtaaatatgtttaggtctaccatttatatcgccttcgatattcattcggtccatttcagtacgtattctatcaatagccgtttcgatatacgcttcacgttcactacgtttcttcttcattaaattgactattctaaaatattgcacattatcaatataacgaagagccgtatcttctagttcccatttgattgtattaataccaagacgatgtgctaatggtgcataaatttctaatgtttctcgagaaattctaatttgtttttcgcgcggcatggctttcaaggtacgcatattatgtaatctgtctgctaatttcaccaaaattacgcgtacatctttggcaatcgcaataaataacttgcgatgattttcagcttgttgttcttcttttgagcggtattttacttttttaagcttcgtcacaccatcaacaattcgagcaacttcttcattgaacatttcttttacatcttcaaatgtatacggtgtatcttcaattacatcatgcaaaaaacctgcgacaatcgtcggtccgtctaatcgcatttctgttaaaatacctgcaacttgtataggatgcataatgtatggtaatccgttttttcggaactgacctttatgtgcttcataagcaatatgatagctttttaaaacatactcatattcatctgctgacaaatatgattttgctttgtgaagaacttcgtctgcactatatggatattcgttgttcattatatgatacaccccattcatatttattacttcgccttaaacaatgatttaggtactcttgttgaatagtatttgtcccacaccaatcatacgtccgtcgacgataaatatttatcctgtcgtcattaatcgtaatattaattttacttgagcgagtttaatttgtatactattcctacttttaaaacttttacaaaaattcgacctaaatctactgtttcattttttaaatattagttctatgatactacaatttatgaaataaataaacgatgttattaaggtataatgctcaatcatctaacattttcagtaaataaaaaatcctaacatctcatgttaagaaaacttaaacaacttttttaattaagtcattggttcttatacatttgatgaaggatttcatttgataaaattatattatttattattcgtcgtatgagattaaactcataacatcgtaatctttaattttttcaataccatttaaatatttcaattcaattataaatgcaatacctactacgataccgcctaatttttcaactaattttattgctgcttcaatcgtaccaccagtagctaataaatcatctgtaattaacacacgttgacctggtttaattgcatctttgtgcattgttaaaacatttgtaccatattctaggtcatactcataacgaatgacttcacgaggtaatttcccttcttttctaacaggtgcaaagccaatccccattgaataagctacaggacagccaatgataaagccacgcgcttcaggtcctacaacgatatcaacatctctgtcttttgcgtattctacaattttatctgttgcatagccatatgcttcaccattatccataattgtagtaatatccttgaaactaacacctggtttcggccaatcttgaacttctgatacgtattgctttaaatccattaatatttcctcctaaattgctcacgacaattgtgactttatccaattttttatttctgaaaaatcttgatataataattgcttttcaacatccatacgttgttgtcttaattgatatactttgctggaatcaatcgatcttttatcaggttgttgattgattcgaattaaaccatcttcttgtgttacaaattttaagtctaagaaaactttcaacatgaatttaagtgtatctggtttcacacttaaatgttgacacaataacataccctctttctggatatttgtttcttgtttagttattaatgctttataacactttttaaaaatatccatattaggtataccatcgaagtaaatcgaatgattatgttgcaaaactatataaagttgagaaaattgcagttgttgcaaggaattagacaagtcttccattgacgttggtaaatctcttaatactactttatcagtttgttgtttaatttcttcaccataataatattcattcgcatttactttatcacttttaggatgaataagcacgacaatattttcatcattttctgtaaaaggtaaactttttcgcttacttctataatctaatatttgctgttcattcatcgcaatatcttgaataattatttgcggtgattgattaccattccattcgttgatttgaacagatcctaatatattaattggctgttcatcttgtaactcaggttctaagtgtccattttgccaaaatagcgcggcgatattactttcaccaagtgtcaattttagatgatttttttgttgacctatcgccttaactgaagaaactgataaatcatccatttcaaaaataggtctagaaaaatctgttccgaagggtcttaaacgattcatatcacgaatatttttaatcgttatatcattttctgttaataatacatctacttgctttacgggatctaacgaagttgttttagataattctttcatccatttatttaaaccttcagctaacgattctatattttcaatatccatcgtcatacctgcagccatatgatggccgccaaatttagcgattaactcttgatgtgctgatagtatttcaaacatcgacacttgatcaattgatctggcggagccttttgcatgattttgctccctatcaatatttaaaattaatgttggcaaagcaaatgtttcgacaattttcgaagcaacaatacctaagacaccttcatgccaattttcttttgctaaaagtaaaaataaatctccctttttaactttcgtttctgccatagccattgcttcttctgtgatagttgctacaatatcttttctttcacggttaaaatgttcaacttgttctgctaaaaatgcagcttcttcttcgacgtcagtcatcaacaattcgcaagctaatgatgcgtcatctaaacgacctacagcattaagtctaggtccaataataaaaccaattgtttcttcatcaatattgtcattgtatcccgcttcttttagcaatgctttaacagaggtcggacattgatcatttaagacttttaatccttgtttcactaatgatcgattttcatcagttaaggatactaaatccgcaatggtacctatcgcaactaatgctttaaaataatcaggtacattttcaatcaatgcttgtgctaatttgtatgcaacacctgcaccacacaattgttggaacggataattaaacgatggatgcattggatgtacgattgcatatgcttctggtaatgtactaccaatttcatgatgatcagttacaatgacatcaactcctaaatcttgaaccattttaatttcattatgaccttgtatgccattatcaacagttatgattaatgttatgccttcatcatgagcatttctaaatgctagttcgtttggtccatatccttcggtaaagcggttaggaatatgccatcctacttgtgcacctaaaagttgtaatgttatcactaaaattgtagttgcggtaacaccgtcggcatcgtaatcaccataaactaggattttctcatcattcgctatcgctcttttaattctttcaatagtcttagtcatatcgctcaattgcagtgcatcatgattgatatctgtatctgaaatgatggattctattgcttgttcatcaataatcgatttactttctaatattttttttacgattggcgttaactttaattttgatgttaattcatcacttatgtattcagctggtttagttaatttccacttatacttcggtttaatcatatatatttacgcctcatttccaaaagacattatatctaaaattactttaaataaaaagcacttatctaaataatcaagactttaattataccattttttaaaaatgaatgcgggaacttatttatatatattttgttaaatttaaataaagtaaaaagcggtatgtgaactctttattgtttcacataccgcttaattcattttaaactaaaatcttttcatcgttcgatttcttttctttatatacaactaatttgtgtttcggcgattttttcaactgacgttttttcattattccccatagcggaacggcaatgaagattgaagagaatacaccagaaatcaatccgataaataatgctaaagtaaagttgaatatcgtaggagcaccgaagaatagtatagcaactactactacaataactgttaatactgtattaattgaacgtgtcattgtctgtctaattgatctattaacgatatcatcaatttgttctgttgtcgtaatcactttaaccttttgtaagttttcacgtacacggtcaaacgttacgattgtatcattaattgaataaccgacaattgttaatacagcggcgataaatgttaaatctacttcaattctaaataaactgaaaatcgctactataatgaatacatcatgtaataatgccaatacagatgaaagacccatgcgccattcaaatcgtaatgatacatagatgatgatacctatcgatgcatagattaatgcaagcattgcattttttgctaattcctgtccaataattggtgatacagtgttaatttgaggtgtgtcaccgaatttcgatttaatattatcactcaatttattatcttgagcacgcgttaaatcgtctttaaattgaacagttgctactttattgtctttaccattgatctgaatttgatccgctttaagtccactatcttttacaacttgctctaccttttgttgagtaattgcttgtttagattggaaatctacgcgtgtaccacttgagaaatcaattcctaagtttaacttgaagatataaagaataactaaaccgacaactacaattaaaatacttactccaattaatggcttagctaatttaacaaaattccatttctcgaatgaagttttaaggtcatgaacatctacaccttcattaatatcatgtcgtttattctttttaacaccaaataaccaaaattgatttttgaatatatttgatgaaacaagtaatgataataagaatcttgataagaacacggctgtaacaaagatcattagaatacctaataataacattgtcgcgaaacctttaactgaactttcaccgaagaagaataatactgctgcggcgataactgttgttaagttagaatcaaaaattgttaggaatgaacttttgtttgctttagaaaaggcttgctttatcgttctacctattcgaagttcatccttaatacgctcatacatgataatattggcatctacagccatacctacacctaataccaacgccgctaatcctggtaaagttagaaccccggaaatgaaattaaatgctactaacgttagatagatataagttgtcaatgcaataatcgctactaaaccaggtaatcggtagaatccaagcatgaataaataaattaatgctacaccaataaacgatgcaaacacagttttatctaatgcatcttgaccaaattgggcacctactgagtttgaataaatttctttcaagtcaactggtaaagaacctgcatttaacaattcggcgatttgttttgcttttttaacgccttcttgtcctttaaatccacccgagatttctacgctatcagaattgattggttgatcaacacttgctgcagaaataaatttagggtttttcttttgtgcttcttttttatagctgtcaccttttttgaaatctaaccaaacaaccatgacattatcacgtttcttagagatttcttccgttacttttttaaatttgtttttgtcttttactttaaaagtaactgtaggctggtttgtttcctgtttaaattcttgtttggcagatccctgtttaatatcagaaccgcttaattttactttatcttctgcatcgcgaattgttaaattagcttgagaagataaaattttacgtgcttcattctggtctgttacaccagcaagttgtactctaattctattaggttcttcaacttgaattttaggttccgaaacacctaaaacgttaacacgattttctaatgtttgcgctgttgattgtaaggcttttttatctattttgtcgcctttatttaaaggatcgacttgataaagcacctcaaatccaccttgcaaatcaagtcctaaattgacattctttataacacttttataagttgcagccattccggcaaacaacaatacgactaaaagcaagaacgcaattattctactacttttcttcacatgaacacctcattatttacgtatgtatttagaatacttgaatactattttataacgcaagttaaatctttcttacaaaatttattagccttatacatattaacatactagagcagggagtaaaaatagtcatagatatatttaatttaaatttaacaattattatgtatcacaatttctttttttggaataaaaataagctattctacatactacttataacttaaaaaggatgaaacgctattcgtttcatcctttttaataccacttctcattatgaagggtcaacttgtttaatagcaggtttttcgaaagttaattcagtaccatgaccattaactgtaataacaacagttgtttcatctactgctttaacagtacctttaataccaccaatagttgtaattctttgaccagattgaatgttattaatcaactcacgatgctgtttcgcacgtttttgttgtggtctgatcatcaagaaatacataaccgcaaaaattacgactatatatattagtaatgaaaattgcattttatacgctcctcttgcttaaaagttttttgggttctcaacatttaatccatattgctcgaagaattcttctttgaaatctaaaagacgatcttctcgaatggcttgtcttatatcttccattaattttagcagaaaatgtaaattatgaatagtagtaagacgaataccaaaagtttcctctgccttgattaaatgacgtatatacgctcttgaatagttttgacatgtataacagtcacaattctcatctaacggtcttaaatcatctgcaaattttgcatttttaataactaaacgaccttgcgatgtcatacaagtaccatttctggcaatacgtgtcggtaagacacaatcaaacatatccatgccgcgaatactacattcgattaacgcatctggagatcctacacccattaaatatcttggtttatctttaggcataaactgctctgtatgttcaaccattttatacataaccggtttaggttcaccaactgacaaaccgccgattgcataaccaggaaaatctaattctactaaatcctttgcactttgttctcttaaatcttcatattcgccaccttgtataatgccgaacaatgcttgatcttcaggtctttggtgtgcatctagacatcttttcgcccaacgtgttgtacgttcaatagatttttttacataatcatattcagcaggcatcggtggacattcatcaaatgccatcataatatcagatcctaaatcattttgaatttgcattgatttctcaggactcaaaaataatttagacccattagtatgatgtctaaattccacgccttcttctgtaattttacgtaaattacttaaactaaacacttggaaaccgcctgaatctgtaaggatcggaccatcccaattcatgaatttatgtaatcccccagcgtgtttgataatatcatttccgggttgtaaccacaaatgatatgtgttgcccaaaatgatttttgcttcaatttgtcttaactcttctggactcattgttttaacggttgctttagtaccaactggcataaacataggtgtttcaaatgaaccgtgtggtgtgtgcacgatacctaaacgcgcacctgattgtttacaagttttaatgtgttcgtatgttactgcaggcatattcaaaatcctcacattctttttatataattaacattgcatcgccaaaactaaagaatctatattctaaatttactgccgttttataagcattcagaacattttcacgactactaaacgctgatactagcataactaatgttgattttggtaaatgaaaattagtaatctggccatcaattgctttaaaatcaaatcctggataaataaatatattagtccagccactcgtttcaacaaatttatcatgatcgcgtcgaattgtttcaagtgtacgtgttgaagttgtaccaactgatataatgcgatgtcctttggacttagtatcatttaataaatcagctgtttcttgtgtcatttgataatattcactatgcatttcgtggtcattcacatcgtctacgctcaccggtctaaacgtacctaacccaacatgtaatgtaacaaatgcgatattaacacctttatttttaatttcaattaataactcatcagtaaaatgtaatcctgctgttggtgctgccgctgaaccactttctttagcgtaaactgtttgataacgatctggatcatctaaacgttctttgatgtatggtggcagtggcatttcccctaattcatctaatctttcttgtaaaataccttcataatgtaaacgcatgatgcgtccaccttgatccatttcttttatgcattcagctataattttgccattaccaaaattcaatttattaccaactttaatacgcttagctggtttcagtaagacttcccaatcattaccttcaatttgagttaacattaacatttcaacttttgcaccagtttcttcttttaaaccaaaaagtctagctggcattactcgcgtatcgttaagcactaatgtatcaccaggtctaaaatactcaatgatatctttgaaatgtaaatgtttcatttcaccagtttctctatccatgactaataaacgactatgatcacgatcttttaaaggcgtttgagcaattaatgattctggtaagtcatagtcaaattcttcaatattcacgttattctctctcctcattcgactttgcaaaatgttcataagctaatggtgttgcttttctgccacgtggcgtacgttctaaaaagcctttctgaataagaaatggctcataaacgtcctcaattgtaatacgttcttcaccaattgttacggcaatcgtatctaaaccaacaggtccgccattatactgcttaataatacagttcatcattttatgatcaatgtaatctagtccgtgttgatcaacttgaagtaaacctaatgcgtgcttcgttgtttcaatgtatatttgttcatcttcattcacttgctggaagtctcttacccgcttcaatagtcgatttgctactcttggagtccctctagaacgtttagcaagttcaatggcactttcttcatcaatacctgtgcctaaaacctcagctgttctaataatgatttcttttaaatctgattcgttataatattctaatcttaagtgcacaccaaatcgatcccttagtggacctgttaagctgccagctcgcgttgttgcacctaccaaagtgaatggaggtaagtcgatacggatacttctagcctcatcgcctttaccaatgataatatctaaaaagaaatcttccattgcagggtataacacttcttcaacaacactactcagtctgtgtatttcatcaataaacaaaacatctccaggttgaagtcctgataaaattgcagccaaatcaccaggtctttctaatgaaggccctgatactgtacgtatattaacttccatttcattggcaatgatattagataatgttgtcttacctaatccaggggggccaaaaagcaatacatgatctaatggttcatgacgaagtttagccgctttaataaatacttctaaattactttttattgaattttgaccaatatattgtcgtaatctcgtaggtctaagcgacaattcgaaatcagtttcttcactatgcattgattgatcaaccatacgctcattcatgacaacacttcccctattaatctatttaaaattaagatacaactaattgaagacctgccttaacagcttcatcaactgagtcatatttatttttatttaacgttttctcaacttttgcaagctctcgtttagaataacctaatgcttctaacgctaacattgcttcttgcacgaattgatcttgcaccgtcgaagtagcgtctacttgtaataatgaatcgctatcttcttcagtaattttcactttaccttttaaatctaagacaatctgtcttgccgttttcttaccaattcctgggaatttagttaaatacgtatcattttcattttcaatggcacgttttacttcattaggcgtacttgtcgctaaaatagctaaagctgatttcggaccaataccagtaactttaattaaactcaagaacatatctttctcttcttcactactaaatccatacaataattgtgcatcttcacgaacaattaaagatgtatgaattaaaacttcatgatctagatgcttttgaaaacgataagaatttggtgtttgaatttcataaccaacaccagcagtttcaacaactacgtgtgtaggatataaatgtgttaacttacctttgacatacgcgtacattataggcacatccttacatactcatactaattaattctacttttgatacataatctaaatttctcaaagcgccaataacatcttctactgaagtttctttagatttagcattcagtgataatgttattgttgctttttcttccattggaatactttgatgaatcgttaatacagatagttctaactttgatataacatctagtacacgtgccaacataccaacaatatcagttacatataaaattaatgtaaattctcgatggtcaagcattttatcgtctactggaaatatcgtttctctatatttataaaaagcacttctagatagatcaaactgtttaacggcatcataaatggacaatgtcggatcactttttaaggcatctttaatcttcaatgttttaaccacggattcaggcaagacatcttctctaattaaataaaactttttataatctttattgtccatcatgtttcgctcctattcaacgaattcaaattctccgccaagaattctaacgatatcaccatttttacaaccacgttctctaagcgcatcatcaatacccatcgaacgcatttgacgagcaaatcgacgtactgctggatcactgttaaagtcagtcattttaaacattctttcaatagcattaccacttaccacataagcaccatcatcatctcttgaaattgtaaatttatcttgtgacggtgtatgtttatataatactcggttaatgccaactgactcctcttcttcaactgtgaagtcaacatctttatattcttctaatttatctgctattgcatataataattgatcaatattatcacgcgttattgttgaaactggaataactggcacatcttcgccaatttcttctttaaacaagtttaaattatcttgtgattcaggtaaatccatcttgttagctactacgatttgaggtctatcttctaaacgttgctcgtacgcagctaattcttgattaatgactttataatcttcaataggttctctaccttcagaaccgctcatatcaatcatgtgaacaataacttttgttctctctacatgtcttaaaaattgatgtcctaatccaacgccatcagatgcaccttcaattaaacctggtaaatctgccataacaaaactacgttgatcaggcgttgaaacaacacctagatttggtttaatcgttgtaaaatgatatgccccaattttaggcttagcttttgaaacgatagataataaagtcgatttacccacactagggaaacctactaatcctacatcagctaataatttcaattctaaagatacatctaattcctcacctggttcacctttttcactgaagtcaggtgcagggtttctaggtgttgcaaaacgtgaattacctcggccacctcgaccgcccttcgctactacagctctttgaccatcttcaacaagatctgctaacacttcgtctgtttcaacatttttaataattgtaccaggtggaacttttaatactaaatcttccgcatttttaccatgcatattactactttggccattttcacctttgcttgctttaaaatgacgttgatatctaaaatctaataacgttcttaaaccttcatccacttcaaatacgactgaagcacctttaccaccgtcaccgccagctggtccaccaaatggtacatatttttctcttctgtatgcggtaataccattaccaccatcaccggctttaagagatattttgacttgatcgacaaacatatatctcacctcttttacatataattttcattttcccaataattatagcatattagagccccttatatattgtaaataattaggggctcttatgcagttacttttataaatctttgctttaaaatacttatatttctcagcaccaattgtggtacagtttattctttaaacgctgcaactgtattcctttgtcccccttatagtttagtgattaggggctcttatacagttgcacatttagtataacgtctaaaattcccattttttaataacataatgaaaataataatgaaaaacattttataaaaagtaaaaaacaccagaagattcacttctggtgttaactagacaaaattattcagctactgcatatacagaaacttgttttttgtcgcgacctttacgttcgaatttaacaacgccgtcgattttagcgaataatgtatcatcgccaccacgacctacattttcaccagggtaaattttagtaccacgttggcgatataaaattgaaccacctgttacgaattgaccgtcagcacgtttagcacctaagcgttttgattcagagtcacgtccgttttttgtagaacttaccccttttttagatgcgaagaattgtaagtttaattttaacatcggaatgcacctcacttataatttaatctaatattctcattatattcttcttcaatagtttgtaaagacacaagcattgtttgaagaattagttgcgcttcatcgttgtttgtatcaacgcttcttatatgaaaatgaccaccattgtcgtcataattgatatctggtctctcagatgtcaatcctataatcgcattaacactaccaaacaatacagctgaagctccagcacaaacgatatcatgaccatattcaccatggtcagcatggccatccataataacgtctgttactttgccttcatcattaactgtaatatcaacagtaatcataataattacgcgttgattttatcgattgttaatttagtgtatggttgacgatggccttttttacgttttgaatttttacgacgtttgtatgtgaatacagtgatttttttaccgcgaccttgtttattaacagtagcagtaactgttgcaccttcaactgttggcgctccaactttaactgaatctccacctacaaataatactttatcaaatgtaaaagtatctccttcgtttacgtctaatttttcaacgaagatttcttgaccttcttctactttgatttgttttccacctgtttcaataatagcaaacatactttgcacctcctgtataataagtcacgccatacataggtgacatttcgttattgagtcaagcgtttgcactctgtgggaaaatcgctttcttcattaaaaatgttcttgaacctatatttgagcggttgtatgtagctacttataactactcaactattgcatcttaccattgacgacgtttcatgtcaatgtcattgtttgtttttttaaggaactttataatcaacggataaagcataatcaacagtacaaaattcataattaatgttggcaataatctaaagactacaaaatgaataatatcaaattgaatgaatcctaacataccgtatattaatgccacatagacttctaataataaggtgctggctaatataataatgaataacatcgaatgatctttgtaaaaaattttaaagaatcgatctataagtgctaaaaacaatatatagccaaataagtacactccataaatactaccaaagtatacatcagtcattacgcctaaaaatatgctgagcaataatgatacgccaaagccacgatacactaccatcattaaaatatacataaatgtaaggtgtggtacaaatacaagttcaaacttacctatgtgcattggaataagaagcccaattgcagtatctatataaaatagtaaaatacctatcaaaaaataatacagtgtacgcattatttatccctgctttcatcatcaggaattgttttaggatctctttttgcaacataaacatgactcaaatctgttaagtccgcaccagtcttaaccctaacttctttagctaagccgtattgatcattttgaaccttagtcacttctcctatatataaattacttggtagttgatcagctaatccacttgtaacgactttatcaccttttgagatattatctctattattaatgtcactaattacaagttctgagttcttttcatcataacgatcaattaaaccaaatatatttttagaaccgtgttgtatatttacagataatttacccgcacgtgtattagttgagattaaatcaacttgtgaagaaaatttattaactttagtaactcttccaacaaaaccttgtgatgtcatcacagccatatttgaagttatacctgatttagatcccttatcaattacaattgtattcatccactgatccggatttcttgccaaaaccgtagtagaaataggatcaaattttgaaatatcttttaaatcaagctctttttttaatttttcattttccgcttctaattgttggttcttagattctaactggctaatcttatttttagattctttagaatctccttttttaaaaaagtccccaatcgtaccagcaacaaaattaactggataactcacaactcgttgtccaaaagacacagaatcacctatatattgttcaggaggtgattgagattgtgaacgtatggacagcccaattaatgcaataaaaacgataattgcacataaaacaacaattaatttgttatttttaaaaaacttaagcacccagaacacctctattatgtcaaaatattgtatatccttttctattttatattactcccattatgaaataaagcactaactacgaattactttgaaaatgaacaactccgtaaaaaatttgtggcattttaaaaacaaaaaaactactagcaaacattccagtcactagtagtttaaataatcgatttaaattttaaaattatttgtttgtatcgttcgaggattcactgttcgaattctgaagttgtctccaacgtgcgaataagttctgggccttttgttgttcattagcttgtttctgttttgattgttctgccatttgaactacaccaaccttttaaatttattctagtgacaggataactaaaatatatttcttatgcaataatttcctattgataagcattttcagattttagttgtaaattttgccctaattcatttaagtcttgttgcatttcaaattcagtattgtaaacacgcattgactcatctccaaatttataaagaataaattcgtctcctctttgacctataatatattgatcattataagccatgcgattcattccagacacagccataaactcttgtttatctatcattttaaatacatttttaatttggcttaatggtacattctttattaaatcattttcttttaatgaatatttctcaccacttacataaacatgttgggcatcattagtgggttgcgtaacttgattcatttgatcattatcgtgatttacaggattccaatcttgttcttttaaaaaaggtgcgtatttcaaggcgatataaacaattatcacaattgctattactgctataatgtttttaatcatactaaatatcaatctcatagttcgcctccaatgtcttcatctaattatatattttattatgtatattttcctcagtcttcagccttaatcatgatatatcttaggactgatgcacgttcatttaaaatagcttataattttgttatgatttaaaagcgtattaggaggtttgtagcattgagtatactaacaattattttaatagcactattagtcatcctcctttttagagttggactttctattttgcgatttttaatttatgtcggacttgttttattatgtatttacttaggatatcaaggtttaatttggttgctcgatttttttcaaataaatagtggatttttaccgcactttcaatttaacaattaaatttattctgcataacaaaactcctaatgtactagtttagaattttttaactagttccacattaggagttttagtttgttttcaagcacggatactacttgatgaacagattactattacttacgcccaaatgcgttagataaaaatcgtatcagcgcgtagctaccacttagtaaaaggccccaaacgattccagtaaaaattgagccaattgctacacttaataaaggaaaagcttgtttcgtaacgattacacctgctaacgcggttactaaaatacctaacgtagataaagctaatgttattaaaagattgcgctttgttacaggttcatttttaatatttaactgcatggtataaaccattggcacgagaaccccgataataataaatagagtcactatttttcctccaatgaaagtacttcgtaggtattatacacaagatacgtcattaattctatcaacttcaatcattttcatcaaagtaacccgcttctacaagactggtaaatctattatcaccgattataatatgatccaataaatctatccctaaaatcaaaccacactccttcaacctcattgttgttatgatatcttcttgtgagggcgttacatcaccggatggatgattatgaactgcgatgattgcattggcattttctctcaccgcaatactaaaaatttcacgtggatgtacaatcgaactatttaatgtacctttaaaaacacaggtttctttaatcactacattttttgaatttaacaataaaatgacaaaatgttcttgtgttaaatctttcattgttggaatcatataatcagcaacatcacttggttgcgttatttttatacgattattttcagctcttctccccatcctttcccctaactcaaatgctgcttttaaagtaattgctttttgtaatccaatccctttaacttttatcaaatcgttaattgaagattttttcaattcattcagattcgaagcagatttaagcagttcattactaatgtctatgctcgagaatccttttcttccggtgttaattaatatagctaataattctgtattcgaaagactttttgcaccatggcttaacaaacgttctcttggcatttctgaagttaccatttctttaattttcaaaaatatacgcctcctaaaaattgatggatatcattataaaaaagtgaattgataaaaaaggaaataaatataaatggaacaaggggtaatagtttaatcggcttaaatatcatggtaattaaagcaactaaaccagcaatgacaaatgtaaataaaatgacataaatagtgaattggagagggaaaaacaaagaaagtgcagatattagtaaaacgtcaccataaccaatatatgcccgaaataaaaagtagaatatatgcgtggtcatactaataatgataaaagctactggataaatcatacttaacgagagagaaacgatacaataaattataattaagcgacaatctaacattaaagaagtgatatcggtcatagtaaaaataagcagaaaaacatatgtagttataaatagcgtagcatttacgtatgtgaaatcatacttaataaagacgataggtattaaagcaaaggtttcccctaagaaatgtgttagggaaatacgctttcgacagtttcgacatcgcccttttaataataaaaaactaataatcggcattaattcataccatttgagtgacgaattacaataatcacatttcgatcttctatgtaaataatcaaatgacgtttcttctatagatataaattgatatagaaaactaaaaatacaactgcaactataagataacaatactaccaaatgacaacctccttatgtaaattatagttagttattaccaaaatgtaaatatacactatttttcaagaattgaaccgctttttcatttaaatttttcaatattgctaagcataattgatggatactttaacaacccattactgctcggcaaaattaataatggcaagaaattgaaccttataaacacatacgatttagagcataaaaaataaccatgaagctctacctattgattaaatagattcttcatggctattttagttttagttttataatgcttcaaagtctaattttgatttaacttcacttatgaaatacagactaccggtaattactaatgtatcaccttgataattttttataaattcaacgtagtcatctactaattgtatttcatcattttcaatactacctacaatttcttctttgcgtaacgctttcggaaaatcaaattcagttgcataaaacgtatgcgcaattaaacttaaatgtttgaccatctcgttaatcggttttccgtttattgctgagaacaaaatatctactttttctttatcatggtactgtttaattgtatcaattagagcatctatactctctgaattatgtgcgccatccaaaatgattaaaggtttgtcatgcacctgctcaatacgtccagtccaacgaactgattcaataccgtctatcatcttattgaaatctaattcaattaatccttgttcatttaattcaataagagctgttatggctaatgcagcattttgtttctgatgttcacctaacatgcttaaaatgattgtttctaattcataatctttataacggtaagtaaattcatcattttgcgatacaacaacaatttctctatctaattcaattggctttgcatgttgttcaattgcgcgttcacgaacatattttaatgcatcttcatttttaacagcatatatcactggaacgttaggctttataatcgcgcctttatccctagcaatatctagataagtaccacctaaaatatctgtatggtctagaccgatactagttaagattgataaaaccggtgtaaagacatttgtcgaatcgttctttatacccaatccagcctcaacaatgacaaaatcaacaggatgtatttcaccaaaatataaaaacatcatcgctgtgattatttcgaattcagttgcaacacctaaatctgtttcacgttccatcatttcacttactggtttaatacgtgatactaattctacaatagcgtcatttgatattggcacaccatttagactaattcgttcattaaatgtttcaataaacggcgacgtaaatgtacctacttcataaccattttcaactaaagctgttctaaggtaagcaactgtagagcctttaccatttgtgccacctacatgaatacccttaatgttattttgaggattattaaattgtgctagcatccattccatacgtttaacacctggtttgatgccaaatttagttctttcgtgtatccaatacaagctctctaggtaattcattgttactaactcctatgcttttaattgttcaattcttgccttcacaccatcatatttttcttgataatcttgttttttacgtttttcttcatttataaccttttcaggtgctttacttacaaagttttcattagagagctttttatctactctatctaattcgctttgaagtttagctaattctttttccaaacggctgatttccttatccatatcaattagcccttctaatggtaataccactttacctgcaattacaactgatgtcattgctttctcaggaatttccacgtcagtgctaatatttaaggtactaggattacagaatttgattaaataatctttgttttgtgataaagttgtttcaatttctttatctttagcttgaattaaaataggtatttctttagacaatggcgtatttacttctacacgtgattgtcttacagatttaatgatttcaacaagttgttgcattgtttgtttactttcttcaaaaatcaatgattcacgcacttctggccatgaagctttaacaattgtgtcaccttcatgtggtaaactttgccatattttctctgttacaaatggcatgaatggatgtagcattctcataatattgtctaaagtataactcaatactgaacgtgtaacttgtttttgttcttcatcattactattcattggaattttactcatttcaatgtaccaatcacagaaatcatcccaaatgaaattatataatgcacgtccaacttcgccgaattcatatttgtcacttaaatcagtaactgttgcaatcgtttcatttaaacgtgttagaatccatttatctgctaatgataagttaccacttaaatcgatatcttcaactttaaagtcttcaccgatattcattaaactgaaacgtgccccattccagattttattgataaagttccacactgactcaactttttcagttgagtatcttaaatcatgtcctggagatgaacctgttgctaagaagtaacgcaagctatcagcaccgtattcgtcaataacatccattggatccacaccattacctaatgatttactcatcttacgcccgtcttcagcacgaactaaaccgtgtaataatacatcattaaatggacgacgatctgtaaattctaagccttggaatatcatgcgtgctacccagaaaaagataatatcgtaacctgtaactaaggcatttgttgggtagtatcgtttaaagtcttcactttctaaatcaggccaacctaacgtagagaaaggccataaagcacttgagaaccacgtatctaatacatcttcatcttgttgccaattttcaatatcagttggcgcttcttctccaacatatatttcgcctgtttctttatgataccaagccggaatttgatgaccccaccataattgtcttgaaatcgtccaatctctaatattttccatccattggttaaatgtatgttcgaaacgttgcggataaaaatcaatacgatcatctgttttttggttatctaatgaacgtttcgctaagtcttccatgcgcacaaaccattgtgttgataaatatggttcaacaacagcgccagatcgttctgaatgacctacagaatgaacatgatcttcaatcttgataactaaatcttgttcttttaaatctttaactagctgtttacgacaatcaaaacggtccataccttcatatttacccgctttgtcgttcattttaccattttcatccataacgataatattttctaattgatgtctttgaccaatttcaaaatcattagggtcatgtgctggtgtcactttcatagcaccagaaccgaagtctatatcaacatactcatctgctaaaataggcagttcgcgtcctacgattggtaatataacagttttaccgattacatctttgtatcgttcgtcattagggttaacaacaatcgctgtatcacctaacatcgtttctggtcttgttgttgcaatttcaataaaaccttcaccatcagcgtaaggatatttaaaatgataaaacgcaccttgaacatcttcatgtattacttcaatatcagataaagctgtacgtgctttaggatcccaatttataatacgttcgccacgataaataattcctttattgtataaatcaacaaaaacttttttaactgctttacttaaaccttcatctaaagtaaaacgttctctactataatctaaacctagacctaatttagcccattgcgcacgaataaatgacgcatactcttctttccaatcccatgcctgttctaaaaacttttcacgaccaagatcatatctagttattccttgttcatttaatttagcttctacctttgcctgtgtcgcaataccagcatgatccatacctggtaagtataacgtatcgtatccttgcatacgtttcatacgtgtaatgatatcttgtaaagtcgtatcccatgcatgtcctaaatgtaatttaccagttacatttggtggcgggataacaattgtatatgtttcttttgatttatcttctgacggtttaaaataaccattctttacccattcttcataacgtcccgcttcaacttcacgaggatcatattttggtttcatttccatttgctatacctcctaaaaaaataaaaatatccatcctatatacaaataggacggatattccgtggtaccacctatattcaagaaggatgattaatatcaaattcactcttttaacataattggaataatcataccaatactatcatcgtgaaatttgaaatgcttcatctcttcaagcactctagattatgattaacgctcaaacacgtcttagcctactattaatcacgttcagctaagatactctgtgggctaccttcagtaaaaatcatttacatactcacaccaaatcatatgctctctttaaaataatttgaacttactcttcccaaatcctatattaaactcttaacttatagtataatgattgacaaaataagtcaatgtataggtgggaataaaatgaatgaatgcgcatttggtactaaagatccagtctacttagactatcatgatcatgtatggggacaaccgctctatgatagcaaggcattgtttaaacttttagcattagaatcacaacatgctgggctatcttggttaactattttaaaaaagaaagaagcctatgaagaagcattttatgatttcgaaccagaaaaggtagcacaaatgaccgctcaagatatcgaccgcttaatgacttttccaaatatcgttcatcatcgtaaaaaattagaagcaattgttaatcaagctcaagggtatttaaaaattgaacaagcatatggtagttttagtaaatttttatggtcatatgtaaatggtaagcctaaagatttgcagtatgaacatgcttctgatcgtatcacagttgatgatactgcaacacaactatctaaagatttaaaacaatacgggtttaaatttttaggtccagtaacagtattttcgtttttagaagcagccggtttatatgatgcacatttacaagattgtccatcaaagcctaaacataattaatttgctatagcatcataaagtaaacgagacatcatctatttttaactaatagactgtctcgttttttaatgtgaaaatttattcaaatcataagttaaagttccaagttaatgctctgctaatattagatatcttaatctaaaaatagatgtacaacctttgcttaaaccttaataatgaattctatcctaagcataattcaacttagatggatgatagtttctaatcttcacgcttattcgaacgatattttaaaaagtaattaattcctggtgcaataataaataggatgaaaaagattcggaaaatatgataactcgtaatcatagcaacatcggcaccagtagctaatgcaactaaaactatctgattaacccctcctggtgctgcaccaagaaacaattcattaataggattattatcaaagaaatgtatgatataaaccatgattagcgcaccaattatcaacataatattttgaattgtaattgcgattgctagtctaccttttaaatctgacaataaatgcgcaatttgaactccaattctaatcatatatattagttgtgccatgttcaacaaccaatgatctagtgtaaatgttaaacctgtagaaaaattccaaacaattaatacaatgagtggtgctaataattgaaatgttggaaactttattttagacataattagataaactataaagatagctatcgctaaaataactatttgccctatgtttaatacttgtgataaaggcaagacttttgttaactttccattcgcatgcatgttaccatcatgaaaaaaatatgaaatgaacggtactaaaacaacaacaaatataattcgtgatgtttgcgttaagctaacaactaacaaattagcacgtttgtcttgttcagccatgaccagcatttgtgttagtgctcctggtataacacttaaaatagctgtttctgtattaatacgtgcaatttttttaaaaacaaatgccattactattgcaattaataatatcgaaatagatacaacaataatcgaaagccaattgtttttaatatccataacgacatttttcgtaaacgttgatccgatttgcacacctaatagtacaatacctaattcactaagtaagaatggccatttaatatcaagtttgaaaacttttacacaaatgattgatgcgataataggaccaaacataaatggaagtaatacgtgcgatgaatacagtagaatactaataaaaaatgataaaacgaacacaatgaaattatttctatatatcattgccatgttttccacttctttcaataaaaaataaaatgactaaattgctgcttgagcttcacgtttgttaagataacaatatccgctagcagttttgactacaaagcatatatggactttcactatcaagtcgccgcccatgccttatatacatttaaaaagagcctgaacaaagttcaggctctcaatttgtccgtatatttattttacaatacgacttaaagccgtatcaaatgcttgaatcgttttttcaatatcttctttcgtgtgtgccgtagataagaatgtaccttcaaattgagatggtggtaaaaacacaccttcttttgccatttctcgatacatttctgcaaataatttcaaatcacttttattcgcttgttcaaaattagttacaggtccttcatttaagaaataaccaatcattgaacctgctctatttacagttattggtacattgtgtttagcaaatacacgttttaaaccgtcttcaagtatatcgcctaacatattaaaatactcatatgtctctggcgttaattggcttaacgtttcataaccacttgtcattgcaagaggatttcctgataacgtacccgcttgataaatatttcctaatggtgctatatgatccatgatttcttttttaccaccaaatgcacctacaggtagtcctccaccgataacttttcctaagcaagttaaatctggtgtcacaccaaagtaaccttgtgcacaatgataaccgactctgaaaccagtcattacttcatcgaaaattagcaatgcgccgtattcagtcgtaatatctcttaatccctgtaaaaaaccttcaatcggcggtacgacacccatattaccagcaacaggttctacgattacaccagcaatatcgtttccaaatttttcgaaagcgattttaagtgcatctaaatcattgtatggaactgtaattgtatttttagcaataccttcaggcacaccaggagaatccggcaatcctaatgttgccaccccagaaccagctttgattaataacgaatcactatgaccatgatagcaaccttcaaatttcacaattttatttctgccagtataaccacgtgctaatcttaaagtatccaatgtagcttctgtaccagatgacaccatacgcactttttctattgaaggtactcggtcaataacgagctgcgccaatttattttcaagtaatgttgatgcaccaaaacttgtacctttatcaattgcttcatgtaaatgactaataacttgagggtctctatgtcctaaaataagtggtccccaacttagtacatagtcgatatactcgttaccatcgatatcataaatttttgaacctttaccgtgatccataaaaattgctggtgtatctactgatttaaatgcgcgtactggactatttacaccaccaggcattaaagtttcagcaaccttcattgcttcttctgatttcgtatatctcataaagtaaattcctcctacagtttatggaaaatcataaatataaaaccttatttatctaaatagcgacaaatgtcctttgcaaaatacgtaataatcatatcagcacctgcacgtttcattgaaaccatttgttccataacgacacgttcttcatctatccaaccattttgtgccgctgctttagtcatactatattctccactcacattatatgcaacaactggaacattcgtatgatttttaacatctcgaactatatctaaataacttagagcaggtttaacaatcatcatgtcgcacccttctttaagatcactttctaattcacgaagtgcttccaaacggttagcagggtccatctgatacgtttttctatccccaaatgatggcgctgaatctgctgcatctctaaaaggtccaaagaaacttgatgcatacttgacaccataactcattataggaatattgtaatagccggcttcatctaatccacgacgaatttcagcaacaaaaccatccatcatattacttggcgcaataatatcagcaccagcttccacttgagaaattgctgttttaacaagtagtggcaatgatttatcattgtcaacgtcatgtgtatggtcatcaatcacgccacaatgaccatgatcagtatattcacataaacaagtgtctgcaacaattaataagtcatcatacatttttttagcaatacgtgttgcctgttgaataacaccatcgtgaatgtatgcaccagtacctatatcatcttttgagtttggaacaccgaaaaacataatggcacgtatgcctaagtcataagcttcttttaattcactttcaagtaaattcaaactgatttggtatacacctggcaatgacttaatttcttttttcacatcgtctttttcaactacaaaaattggatatattaaatcttcttttcttacatgattctctctaaccatatctctcattgtcgctgatgatctcaatcttctatgtctatcaaatttcatttttagcccctactttctaaaatcttttcaattagtgattcgagtgtttgaatttctgcaattgttactggttgttgatatgatttaatggtccgtgctgtttgttctccaatagcaaaatacgacttgaattttggtacaaatccttcattaaaataataacgtactgccgacgaacttgaaaatgttaatgcatcgatttgttgatgttctatcatttctttaacatcttgtatattttgtttgttaggcactgaagtatataaatctattttaacaacttcattatctttagataacgctgctaataacaatggtctcgccaattcactcgaaggcaaaagtattttttggttagtttgattaaatgattttaaaaatccttcttgagaaaagtcgtttggcataaaatcaactcgaatgccaagtgattcacaatattgcgctgtcttacttcctatcacagcaatgttatcaacattaattccttttagatatttataaaagaatttcacagcatttttagatgaaaaaataagccagtcatagcgttgatttaacaaatgaatatcaaaatttagtggctttatatcaataaagggtttgtgaataattgatactaaatcactttgcatgtcatttgtttgtgtcataactacaactggcttcatatttaaacgtcactccattatttaatgttgttcatttaagcgttttataatttcataagcaccttgctcttttaatttgttactcactgttttgcctaactcaaccggatctgttccgttcattgtatattcaaatcgttctttaccatctggggtcataattaaacctgtaaattcgatttcgttttgatctgagattgtagcatatcctgcaattggcacctgacaactaccatccatttctgctaaaaacgttcgttcagcagtcacacattttgcaacctcatcattatgtactttgcttaataatgttaatagttcttcatcgtcactacgacattctatccctaaagcaccttgtccgattgcaggtaacaatgtatctctatcaagataagatgttacaatatcatctgaccagcccattcttcttaaaccagctgcagctaaaataatcgcatcataatcttcagtttgtaacttttctaatcgtgtatctatattacctctaatccatttaatctctaaattaggatacttagataatatttgtgcaccacgacgtaatgaactagtaccaataatactgccttctggcaattgggatagtggtgtatgtgttttagaaatatacgcatcaaaaggtaattctctatcagggatacaacctaatgttaaaccttccggaattacacttggtacgtctttaagcgagtgtattgccatatcgatatttttttcaaaaagttcatgttgtatttctttaacaaataagcctttgcctccgactttagacaattgtttatctactatacgatcgcctttcgtgacaatttctttaatttcaatttctagatttggctcgacagcttttaatttatcaataaattgctggctttgtgttaaagctaatttacttcttctggagccaacgactaatttacgcatgttcaattcctcctaggaacggattgctctagattattttctcaattcacaaaatgtgttgcaaaaaataaattaatcatatttaagcaaaataaaataatgttatagtatattaaatatcttgaattcaaccatttgttgattctaagtaaaatataacttccatataatactgtaataattgaagagagtattaccttcgggtcaatgaatatacgttcaccaactgaaattacaccccactgtgtacctaaaataatactaaatatgagaattatccacccacttaacgttgagtaaaacacaattgattcaagtgtagcaacgctaccaattctaaagtatttttgatcaaaacgtttttccttcaaattacggtattgcatgatatacagtaatgcattgacaaaagctaaggcaaagaagacataacttaacacagctagaccgatatggactaacagtaactcgtctacaacagcaattttctgaaccttattagtataatgtgtcggttgaaatgtattcatccctaaaagtgttaaccctattaaattcaagaaaaacacagagaaattcaaaactttgataaggttaagaattaaagagattgaaataatcagccaacttaaagtatagaatacatctgaaatagaccctaatggaatatgtctagtttgtataataaaaatagataaagagattgtttgtaaaacccaaacaatccccaataaatatatgcctaaacttctaatcttatgacttttttgtacaaaatcataaaaatagcaaatgatactgattaagtatattaataatataatttcattgaatcgaataaacaggttttcttgcatattatcaccatattaatatgcttattcaaaactaaagatacgtcgcgctgaaatttccttgaccttgctttctttttgttgcttcgcttgctcatgaggacattcagcttcgatatcaaatatattttgaaatagctctaatttttcattacttttcttatcactacttaattctttggcctgtttaataggatctttcaacatttgattgatgatactttttgtatgtttagatataattttacgttctctttcgcttaaccctggcaatttacgatcaatactgtccatcgtttctgcttgaattgccatagctttttcacgtaaagctctaatcactggaacaacacccaacatactaatccactcattgtgtgcatgtatttctgtaggaatttgttccgaaattgttgcagccgctaattgtcgctcacgtaagtttgcatcaactaaaccttttaagtcatcaacatcataattaaagatgtttgtgatggcactaataccaggttcaatatctcgaggaactgcaatatcaatcaatactagtgaatcttgctttctattttctgcaattctttctatcatttcatttgtaatgatataagattgtgcactcgttgaactaatcacaatatctgcactttcaagtaaatttggtaatgatgatagttcatcatatttcacttgatgctttgctgctaatttcatagcattttcaattgttctatttactactgtaatatcagtaattccagaaccaagaagatttaatagtgataattcactcatttcccctgcaccaataatgatagcttgcttacttttcaatttgccaaatacttttttcgccaactcgaccgcagcataagacacacttacagcattatcagctatatctgtttcattatgtgctctttttgcaaaagtaattgcctgtttaaatagatgattaaaaattgttcctgtcgtacctgtgctttgcgctaagaaaaatgcatctcttatttgacctaaaatttgagtttctccaagtacgattgaatctaaaccagaagtgacacgcaataaatgttctactgcttcgtcccccacttttacttctgacattgctttaatatcatctacttcaaatccaaatgcacgagctagaaatcgttgaatatagtaacgacctgtgtgaatttgatcaacaacagcatatacttcagttcgattacatgttgataatatgacattttctaaaatagatttagtttcatataaatcttcatgggcaattcgtaaggcatcatctctaaaagtaacttgctctcttagtgcaacatcagctgtgcgatgatttatactaattgcaataaaatgcatttgaaacgcccccatatatactaacaatacaaatattataacataatttaaaatccaattaagtacgatgcttaaataaattataatctttctaatttacttttgagtttttgacaaaatgatgaacgttgaaaaatgttatcaattgtgtactaattaaaagtttcgtgcttacattatttttaaaatttttgtataagttttgacgtacaaaaactatgaaatatacggttcaattaaattccatatttgttgttgtttattattttgaattgatgaataacttacaattgtatcgtctgggtccatatctaattgtgtcttaatatttttaatatgcttttgaaccttaccttttggaattttgtcttctttagtgcatataactaaagtaggaatatcaaaatgtttcaaataattgtacattaagatatcatcttgtgttggatcatgtcttaaatcaactaattgaataactaattgcaaattctctctcttagttatatattcctcaatcattttcccaaatttttcacgttgtgttttacttactttagcatatccataccctggaacatccacaaaaataagttgttcatctatattataaaaatttaacgtttgcgttttgccgggttgctgtgatgtacgtgccatattttttctgccaatcatactattgataaatgtagacttacctacattagatcgaccgctcagtgcaacttcagacaattctgtttctggatattgttcttcttttactgcactaatgattaattctatattattaggattaactttcattttatatcctcacttttttatattctctttcaattctaccattatataatatttgaacctttcggtatacattataaaaaagctccgatcaaagttaaactatttgagcgtcaactttgattggagcttttcacttttataacacatcaatgattaagctgatgttttactattattaattaaattgccttctgcgtcgtatagttctggttcagtttcttcattaattgtttgtgctgtaataactaccttcgttacattttcgttagaaggcacatcaaacataatatcgattaacgattcttctatgattgaacgtaaaccacgcgcacctgtttttctttcaattgctttttcactaattgctgataaagcttcttcagtgaactctaaatccacatcatctaattccagcattttagtatattgtttcacaagtgcatttttaggttgcgttaagatgtttttcaacgcagttacatctaatgtttctaaattagctacaattggcacacgtccgataaattcaggaatcaaaccataggcttgcaaatcttctgggcgaatttgtgctaataatgcttgttcgtcatatttatcagcttcattgcttgagaaaccaataactttttcaccaagacggcgcttaatcacttcttcaataccatcaaaggcaccaccaagaataaataagatatttgttgtatcaatttgaatcatttcttggtttggatgtttgcgtccaccttgtggcggaacacttgcagtcgtaccttctaagattttaagcaatgcttgttgaacaccttcacctgaaacgtcacgtgttatagatgtgttttcagatttacgtgcaattttatcaatttcatctacataaataatacctttttcggctttatcaatgtcaaagtcagctgcttgaattaatctcaacaagatattttcaacatcatcgcctacataaccagcttcagttaaacttgtcgcatctgcaattgcaaatggtacattcaacgtcttggctaaggtttgagctaataatgttttaccactacctgttggcccaattaatgcaatgttacttttttgtaattcaacatcatcttcttttggtcctaattgttgaatacgcttatagtggttataaacagctacagctaaagattttttagctttttcttgaccaataacatattcgtttaaatgatccataatttctttaggagtaggtaattctgtcatcgcttcagaagtgttttgagctaattcttcttcgacgatttctgagcataattcaatacactcattacaaatatatacaccacttcctgctacaagtttttttacttgatcttggtcttttccgcagaaagagcatttcaaattttcttcatcttcattgaatttaaacattctttttacacccctattcgttaaagactatactagattggatgttacaatgcaacatattaacatacaaactttttgcttaaagaatagtagcagatacataagctatgcatctgctactcatttttgtaatttaatatttaatgaagattaatcttctttagttccttcaacgaactttgcgttatctcttaataaatcgataactttttggatacgaacatcatttttaatgatatcagtattacctaaagtatttttgatatcttcaactgagatattaaattgtttactcattttttctaattctttatcgatatcttcatcagtagcttcgattttttcagcttcagcgatcgcagttaaagttaagttagttttaacacgttgttctgcatcgtctttcatttgctctcttaattgagtttcatcttgacctgagatttggaagtacgtttgtaaatctaaaccttgttgttgaattctttgtgcaaattcagacaccatacgatctaattcagtattaaccattgcttcaggaatatcgattgttgtattatcagtagcttttgtaatcgcttcttctttttcaacattttcagcatctgtagctttttgttcagctaaacgtttacgtaagttttctttgtactcgtctactgtatttgcttctgcatctaattcattagcaatttcatctgttaattctgggacttctttaaatttaatttcgttaacttttgttttgaaagttgcttctttaccggctaattcttcagcatggtattcttctgggaatgttacgacaacatctttttcttcgtcaactttcataccttctaattgctcttcgaaaccaggtatgaatgaacctgaaccgatttctaaatcgtaaccttcagcttgtccaccttcgaattcttctccgtcaactgaaccactaaagtcgatgttaactgtgtcgccattttcaacaacaccatcttctttaacgaccatttcagctaaatgtcctaagctgtggtcaatcgcttcttgtaactcatcatcagataattcagtttcttgtttttcaatttcaagacctttatagtctcctaatttaacttctggctcaactgtaactgttgcttcaaaaatgaaatctttacctttttcaatttgagtaacacttacttctggttgtgcaactggtttaatatcagtttcgtcaattgcttcaccataagcatctggtaataaaatgtcgatagcatcttgatataatgcttctacaccaaagcgttgttcaaaaattggacgtggcactttacctttacggaatccaggtacgttaatttgtttaaccacttttttgaatgcttgatctaacgctttgtttactttttctgcaggaacagtaacagttaataaaccttcgttaccttcctttttttcccaagttgctgtcatgtatatatacctccatgattaactaatttattttttcaacttccctattatatcatacgtctattccctatacaaacattgaaatcacaacgtttatatatttgtaaatcaacttttttcgtcaaaactatattaaaatgctgagtattattttgcaacaatttaactattattattcaaatctaattgctgaataaaattaaatgcatcgatactttgtaattcacatttaagtcctaacatatttttgaaataacattcgtatgcattaatccatttattcgtttcaaacaaagtttcaatatcaattggataaatcatgatagagtgattattcataatatggtgtgcttcttcagcgatatgtaaagcaccatcatttaatgtttccataacgttaggtataactttttctttaagtgttgtatgttctagcccttttaaattagctggtacaaaagttacatccataccatacttttcaattgtcagttcttgtgtacaatttgcgaaccttaaatactcaatcattaaactaatgaggttataactgtacgtattagattttaatatatataataccgtttcttgaaattgaaaatgaccattgtctattaacttcaaaatcaagtgcgtctgttccctcattgataacgtatcaaaatcagctaatgactgagtcaatcgtttttcatcttcaattaattttgacttagcaaattctttaagaggatgtaatgccattcttgttttgtgatctttgacttcatcaataatttgatgaattacttctaccgcttcaaaatattgtcccaaaccaatcaaacttttcacgtaataaatcatcaatgcatcatattgttgtatgccagttttcaataagacaattgtttcttctcttaattcaagaaatgaccccgtctcatataacatacggcatttcatcattgctatttcttcagtgagttcaaattgacgttcatattgcacaatatattcatacatcaggtcatagttttggtcttgttcagcacgttttatatctttatataactttttcgaagagttaggaaactgaataatatctgacatatatgtcacctcgtttgattataaatcttgaaggattaatgcactccacgtttcgaaatcatcatatgactctatgttgcctttttcaacccattttattcgtaaagtatctgtttctttagcttctacatcattcgtacttacagtgattttaaatacaacaccaatatgtaccttgcccacttcattattatcgtcattaataaaaccgatatattccatattttgtgaatcttgctcacttaaacctacttcttcttctaattctctctgtgcattaactctcaatacttcgttaatagattctgctcctggaacatcattcatatgaccgcctacacctattgaagattgtccatgcaatcgagcttctccaccgccagataatcgttcatacactaatatctcgccatgctcattttcaagtaaacaataagaaatgagttgtttatatgatggatcctcttccatatcgccgcgtcgcttaacttcatattgacttagcgcatcaaaaatattttgaccttctggtttattcttatttaaaaacccattgaaagtattcttttcattattaaaaataatttctctaggtactacaatgatttgttcatcaaatttagacatcgtataaaactcctcactttaatgtttgttctcttaaatgcattttagcaaatatgtcatattttagcgattaaatgtggcattttgctatttaaaaaataaaaaagagatgacaatgccatctcttttttataagtgttattattttaaagcatctttagctttagttactaattgagcaaatgctttttcgtcagaaattgcgatttctgataacattttacggttaatgtcgataccagcttttttcaaaccgttcattaaacgtgagtagctcatttcatgttgacgagctgctgcgttgatacgtgtaatccataatttacggaagtcacgtttacgttgacgacggtcacggaaagcatattgacctgatttcattacttgttgcttagctactttgtataatgtatgttttgaaccgaagtaacctttagctaatttaatcgtttttttacgacgcgctcttgttactgttccacctttaactcgtggcataaaaaattcctccttaggtaattcctaccgatttctgtatttgttcttattttttgtatgctaataattgttttacacgtttcatatcgctcttagacactaatctagctttacgtaattgacgtttttgtttagtgctcttgtttgcgaataagtgagatgtgaaagctcttgaacgttttaattgacctgaagcagttcttttaacacgtttagctgctccgcggtgagttttcatttttggcataatataagtcctcctgtaatagctttaattatttttcagctgttggcgctaacatgataaacatttgacgcccgtccattttaggtttttgttcaactgttgctatatctttgcattcatctgcatatttttctagcacacgttgaccaatttccttatgcgtaatggcacgccctctgaaacgaatagatactttacatttatcgcctttagttaagaatttacgtccgtttttcaacttcgtttggaaatcatgttcctcaattgttggacttaaacgaatttctttaacattgataattttttgtttctttttcatttctttttcttttttctgttgttcgaatttgaatttaccgtaatccataattcttgcaactggtggtttcgcattcggtgcaacgaccactaagtctaaatctacacgttcagccatttttaaagcttcacgctttgatttaacaccaatttgttcaccatcttgaccgattaaacgtaattcttttgcacgaattttgtcattgatttgagtttgatcttttgctatggttgacacctccaaaatttttacgaaatttgcaccaagcaaaaaggaagagcaggtataaaatacccgctcttccttatacacagttatgtgtaatgtgattaacctgccaactgctttatgcgtcgctacaggtgagaagcgggtgcttctacttggttcgtttcgtattcaacgttattaatcatatcaacaattcacatttaagtcaacactataactgtaattatttttattttaaccttttatttcatccattgacacgtcttgacgtaaatctacttgttctaatggaatttttttcgttttatatcgaagcttatgataaataaagaatgctaaaaatactggaattcccatatacgtaattaagaagcgactaaaattaaaatctcctgttttaataaagtcaacatcttgaccaataattactacaatacataaaaagccagcaaataatggtccgaatgggaataatttagcagtatattttaatttagatttgtcataattttgtttatcaaatgctcttctaaatcgataatgacttactgctatacctacccaagcaataaaaccagttaaaccacttgctgcaacgatatattcgtatgcaccttttgtaaggctttgtaatacgaaaattatcactacaatgattgctgtaacgagtaacgacatatatggcacaccgtttttatttgttttaccaaatgcttcaaacgctaatttatctttactcattgaatatagcattcgagttgaagcatacatacctgagttacctgctgataacacagacgttaaaatgactgcattcataaatgatgctgcaaacgcaaatccagcatttttaaacactaatgtgaatggagacgttgctacattatcactaccccccattaatgcactactatcataaggaattaacataccgataacaaaaatggctaaaatgtaaaataataaaattctccagaatacttgtttaattgctttcggcacagcacgttcaggattttctgattcaccagccgtaataccaattaactcagtaccttggaatgagaaaccagcgattaagaatacacctagaattgataacaaacttcctcctaagttgccaccaagaattggaccttcacctttattaaatatttcgaatcctacaacatgaccacccatgattccgacaatcgttaataaaccaattgcaatgaaaacaataactgtaaccacttttatcaatgccaaccagtattcactttcaccatagacgcgaactgataacgaattcagactaaaaattataactaagaacaacgcactccatgcccaagcgggtatgccttgcaatggtgtccaatattgaatgacttgtgctgcaatcgtaatatctgctgctacagtcactacccagttaaaccaatagttccaaccaagcgcaaaccctaaagatggatcaacaaatcttgtagcatatgtactaaatgaacctgatactggcaaatacgtagccatttcgccaagtgacgtcattaagaaaaataccattattccgataattgcgtatcctattaatgcacccaaagcacctgcatcatgaattgctccaccagaagttacaaataaacctgtaccaatacaacccccaatcgcaatcatagaaatatgacgatctttaagtccccttttgacaacattgttactttcattttgaacttttgacatataagctccctttccatgttttagaggccaagaaataaataacctttattcactttcatacccttttttacagaacatagtgatattaaaagtaaaaaagtggctacatacctttaagatatgcaaccactttggcaattatctatataaggtagcacatcacattctgtgacagtacagttcctattcgaaaactgtcccaatagatataatttatggtttatatctatttcggcatctttacctttcacttgttcaacttatgtaccataaatacttctgacaagttactaattaaacatgcaacctctaactcaatttaatattttaactaacttgtaatatacaggattcatcacgcataatcaaccctgtaaaacttgatacgcaataaaagttttaaagcattttattgcgacaactgtctatctatgttttttcaaacgaatttcatcaactagattccagataaattcatctttttcaactgtttcttggtcttgcgatccatattgacgcacattcacttgattattttcaacttccttatccccaactacgatttgataaggtattttttgcatttgagcttctctgattttataacccattttttcattacggtcatcaatacttacacgaacgccttgagatttcaattcatcttgtaattggcgcgcataatcataatgtaaatcaacgttaactggaatgatttgaacttgttttggcgctaaccaagttgggaatgcacctttagtttcttcagttaaaaatgctacaaatcgttccattgttgatacaacaccacgatgaataacaactggacgatgatgttcaccatcttgaccaatataagttaaatcaaaacgttctggtaataagaaatcaagttgtgctgttgataatgtctcttctttacccatcgctgttttaacttgaacatctagtttcggaccatagaatgccgcttcaccaatcgcttcttcgtacgataagccaagctcatccgctgcctctttaagcatattttcagctttattccacatatcatcatcatcaaagtacttttctttatcttcagggtctctataacttaatctaaagctataatcctcgaaaccaaagtctttatacacatcaataatcatgtttacaacgcgtttgaattcttctttaatttgatcaggtcgaacaaagatatgtgaatcatttaaagtcataccacgaacacgttgtaatcctgatacagcaccacttgcttcatatctatgcatcgttcctagctcagcgatacggataggtaattcacgatatgaatgtggtttattcgcataaatcatcatatgatgtggacagttcattggacgtaataccatagattcagtttcatctaactgcattggtgggaacatatcttcttgatagtgatcccagtgaccagatgttttgtataaatcaacattagcaagtactggtgtataaacgtggtcatatcccatgctaacttctttatcaacaatgtaacgttcaatttcacgtctaattgttgcaccgttaggtaaccataatggcaaaccagcaccaactaattggctatttgtgaatagttctaactctttaccaattttacgatgatcacgttctttacgctcttctaacatttgtaaatgtgctttcaattcttttttatcaaagaaagcagtaccgtatatacgttgtaacattttgttgttactatctccacgccagtatgcacctgctgtagataatagtttaaactctttaattttagctgttgatggaacgtgaactccacgacataaatcagtaaaatcaccttgactatataatgttacattttcatcttcaggaatcgcgtcgattaattctaatttgtattcatcattgctgaataactctttcacttcatctcgtgaaaccacttttcgttcgattttcatattttcgttaacgatttgtttcattgttttttcaatttgttcaaagtcatcagatgagatgttttggtcaatgtcgaagtcatagtagaatccaccttctattacaggacctacaccaaatttaacattaccatataaccttttaatcgcgtgtgccattaaatgtgcagtagaatgacgtaatacctctaacgcttcttcactacctggtgtcacaatttcaattgatccatcagtttcaagcggtttagttaaatctacaagttgcccgttaaatttgccggcaacagcttttttacgtaatccaggactaattgattgtgctatatcttcagtagtagtacctttatcaaacgcctttttattaccatctggaaattgaatattaatttgttccatgttaaaccctcctatttgctttataaatacttttatctgacctcgttaaaaaattgaacaacaatcatcgttttaacattaaacctattaacaataaacagggaatttatgacaccaacaaacatttatgtctgaaaaaaacaaaaaatcccgcccctatacaagggacgagatcgtcgtggtaccaccctagttatctaatacaatttatgtattaaatatctctgcttaagataacggtcttgatccgggtattcattacaaataccataaatgaagtagtaatcatctaatttattaaccatattctcatcaaacaatggctttctgtgtaatattgattagatcatcttgtcttcaatcatttaaacgatttagatttgtattcattatacaccaatcattttaaaattcaattgtttctgaaattttctcctgataaaaagtatggtgttgacaaagatttgacacgttcaataatacgtgctgctttagtcttctcttcaccatcacgagtcatcgctaaatgatgttccaattcactatagtcaaaattagaactaaagaatgttggtaattcatgaaccattcgataatgtagcaaaggtccaattacctcatctctcacccatggagtcacttcttcagccccaatatcatcaagcattaaaatgtttgcttctcttacgcgatgtaatttcttttcaaaagaaccatctttaaagccaccttttaatgttctaataaattccggtaaataaataattgtcgaacgtaccttcttagatttgagctgattcgcaattgcacctagaataaaagatttacctgtcccaaatggaccataaaggtaaaggcctttcacttgttccccattagttattgctgtacaaatatcatctgctgccatagctacatcaagacggtctcgatgattcatataaatatctttcaatttggcatttaaagtatctcgttgcatatgatgagatgtaattagctcagcttcaaagcgttcttcgtcgtacttgattttacatgggcattgtaaatagcgtattttaattcggttattatcaacatataactcaggcacatgcccctttacgaaatttggacaatcagcaaatttatgaccgtcataatgtttttgttgatctttatactcttgtaacacatttaagtcttcatcaatcatagcattcgttaattcagctcgatgcgcttccaaaaattgcttaacatctgggtcattgattacttctttttttatcttttctattcttttttcaaagtcctgcgacgtgttaattatacttttaaattgcttcattattgactgtcctcctcccattttttagataatttatctagaaatgcttgtcgatcttgctctaattgttgatcatctacgctattatctttagccgaatcttcttcactaggtttatctctattttctaaccatttaggtgttttttcttttgaaatacgattacgctgcccatagtatgaaccacgcttttggtaatttccgctagaaccctcatttttaggttgattaacttttttagcgtaattatatgcttctttagctgtcttaataccttttttcttccaatttgatgctatttccaaaatatacgctttaggaagtttcatatcttcttttaacatgacaaattgcaacaaaatattaatgacgccaaaagacattttttcacgttcaattaattcttcaaccattgtcttttgcgatatagttggttctgattcagaccaagaagctaacatatcaattggactcgtttgttcaagtaactcaaaccattcatcactttgtggctttggattcacttctgaagatttgcccgccgaagatgatgtagcaggagatttcacctgtaatttaggcatttgattttcgtgttccattaagtaatacgagcgtgcttgtttacgcatttcttcaaaggataactgttgtccacttgtaattgaatttaaaataacatgcttcatgccatctgctgttaaaccatataaagtcgcgagttgtgtaattaaacgctttgcatctttggtaacaatgtcttgactaataaaatgtttacctaacatttgtctcaacatttcaaagtcaaaagattcatttgataaatcgataccttggtacggttcattaatcggaatatcacttgtatcgatatctatttttgtagacggcactttaaaaacatcagtaaattgtcttgttacctgtttaaattcactcaaatcaatttgttgatactcaaagtatttcttcaactcatgaaatcgacgatgctcgacttcactatataaaaagattgacaacattggatcattaaaaaataaatgtgctgaaggcggttgaattaattggtaaacaaattgtgtttcttgttcatcatgtttgacaaacgcctttaacaatccaatcgcttcaagtaagtccatttgttgtctaaactctagtaaattaattttaagttcattcataaaaatataatgagaaagaatcaatgtttcattatgactttctttaacgaattgagtcataaaatgatataaacccactgcttgcgttccaattagcggtgtatacagtcgattcaatacctctaaatgattcgtatttaaatcaaagtgttgcataactttgaattgatcctttggtcttaagccgaattcgaaggcttgtcgtcccatttaagcatcactccgtttgttttcgcttaaaatcccttgcatcgatgctaacaattgatcaacatctttaaattctttatagactgatgcaaatctaacatatgaaacttgatcaacatgcattaacaagttcataacgtgttcacctatatctcgtgaagacacttccgtatgaccttcatctcgtaattgccattcaaccttgttagttatgtcttcaagttgttgatatctaactggtcgtttctcacaagaacgcacaagtccattaagtatcttttctcttgaaaactgctctcttgtgccatcttttttcacaactataagctgactaacttcgatatgttcaaatgtagtgaaacgtgttccacaattttcacattctcttcgtcttcgaatggcatttaattcatcggcatgccttgaatctacaactttagattgtgtagaattacatttcgggcatttcattacatcaccctctttattttgattatgcctaattatactataaatctagagatgaaaaaagaatccctcaatttaattcatttaaccaaataatgaaacaataaaaaacattatatcgttacttattaagtaatttgcatgacaatattattgtattaaaaataaaaaacctaactccgaagtcagagttaggctataaattaattgtattaacttgcacttacagtttcttttgatgtcaaaagtgctccaatttgctcagcaacatctacaactctatttgaataaccccattcattatcataccaagcaataacttttactttattccctgacatgaccattgttgattttgcatcaataatagctgaatttggattagtattaaaatcaacagacactagtggttgatgttcgacttctatgataccttctaaacctgcattttcaaaagcttggtttacttcttctgcagttacttctttttctaaatcaacaactaaatcaacgagcgatacattctttgttggtacacgtaatgccatgccgtgtaatttaccttctaattctggtaatacttcttttaaagctttcgccgcaccagtagaagtaggaataatgctttcattacatgaacgtgcacgtcttaaatctttatgtggattatcaatatttttttggtcatttgtaatagcgtgaacagtagtcattaaaccattaactattccaaactgattatttaaaacttttgcaactggaccaatgcaattagtagtacatgaagcattactaaaaatgtcaaatgcttctatatctaattggttatcatttacgcctttaactaccatttgaacatgtccaccttttgaaggaccagttaacaaaacttttttggcacctgctttaatatgtgcgatggctttatcaccatgattaaatttaccagttgcatctatagcaatatcgatatctaattctttccatggcaagttttcaggattgcgatcagcaaccaatttaattttatgatctccaacttgcaatccattttcaatcggttcaacttttagattatattttccatgtgtcgtatcgtaattgattaaatgtgcaattgtttcgggtggataactagcatttatcgctactacatttaaatttttattttgtaatgcaatacgtaataccattcttccaattctacccataccattaattgcaatattcgttgacattaaaagcaccccttgatctttatgtgttatactttatggaattagtatagcatattatatgaaatttgaaagcgttttccgttgatttatttatcttttttataaaaaatagtcattacttacatacatcaacgcgtacgtaaagtaatgacttatttatagtgtaatattaatcttcttctccgtaattcggcttttcaatataaccttcttcttctaacaatctctcaaggttttgttttaattcaagtttatcccctaaattatcgataacatgatcggccattcggctttttttatcaatagaaatttggctatagacacgtgctttcgcatcttctaatgacaaattattacgttgcattaaacgatccatttgtatactttcagaagtgtatacaacccacacttcgtctactgcattttccaattcattttcaaataataatggaatatccatgattacattatatccttgttttaaatattcttgcttttcttcttccataatatctcgcacgataggatgtatgatagcatttaattctaagcgtttttctggatgattaaacactagatcacccatataacgacgattcatctcaccattttcatcaattgcttcatcaccaaagacttctcgtacttgagctaaacctttactcccctttttaacagcttccctggctgctttatcagcatctactactttaaaaccgaatacggataagagttctgatactgttgattttcctgaggcgattccacctgttagaccaataactttcggcataatttcactctttctttatttttgacatactggacaataatgactatttcttgtcgcgatgatttttgtttcaatttgacttccacacactttgcataccggctgcttatatacattaagatgcaattgcatctcaccagtttttccatcagcatgacgataatctgaaatacttgtaccgccatatttaataccttcttctagtacttctctaacataataaaaaaccatttcttgttgttggtgtgttaagtcttttacttttttatctggtaaaacacctgcacgaaacaacgcttcacatgcgtaaatatttccacaacctgcgattactttatgatccaaaatcacttgtttgattggtttattcttattagactgttgatgaattcgatttaaataatacgtcaatgcttcatttgaaaaaggttcaggcgctatttctaaaaatgaaggataagatgctacagacgcaacatttctaatttctccaaaacgacgtatatctgaataaattaactttttgtcatttgacaactcaaaaataacatgccaatgcttacgataattaggtatcataatatcttcaagttcatctacaatgaaaaaaccgcccgccatacctaaatgactaattaatgtacgttgttctcgtttattatctagctgaaaaacgatatatttacttcttcgttctacatttgtaatggtatagccttccgataaagttttaaaagtatctaattcaattccttttataattgtttccttgccttgagctttaccttcgattactttatccgaaaatataacgtgttcaattttttgatttataacgtagggttcaattcctctttttacatgttctacttctggtaattcgggcataccattaacctcactttattttgcatcataccaggttgcaccataacttgagtctacttttaatggaacatctaattgcaatgcattttccattatctcttctacaaattcactaaatgaatctacttctgacttaggtacttcaaaaattaattcatcgtgtacttgtaataatagtttagcttgatatgttgtctctttcattttttgagcaaatttaaccattgccagtttaatgatatctgcagcactgccctgtattggcgtattcatagcagtacgttcagcaaagccgcgtaaattaaagttacgactcgtaatatcaggaatatagcgtcgacgatgtagcaatgtttccacgtaacctaaagctttggcatcttttacaatatcagacatatattgttttacacctgggaaactagctaaataatcatcaatgaatgcttttgcttttttacgagtaatacctaaactttgacttaaaccataatcacttatcccataaacaattccaaagttaactgcttttgcttgacgacgcattaaactatcgacttgatcagcttctacaccaaatactttcatagcagttgctgtatgaatatcatcgccgttgataaatgcttctttcatactctcatcttgtgtaatgtgtgctaatacacgcaattcaatttgagaataatctgctgataatataacgctatcttttgaagttggtttaaaggcttttcttattttacgcccttcttcaagtctaaccggaatattttgtaaattaggatctacacttgataaacgtccagtttgcgctaaagtttgattaaaacgtgtatggatacgttgatcatcactaattaccttttgcaatccttcaacataagtagactgtaacttagataattgacgatattctaaaatataatcaatgataggatgttcaccttgcaattgctctaagacatctacagcagtagaatatcctgttttcgtctttttaataacaggtaattgtaatgtctcaaacaatacaacacctaattgcttaggagaatttatattaaaatcttcaccagctgcatcatggatatttcgaatcaagacgtctaatttttcttgaatttctttttccatttcttctaaatcatgaacatctgtaaatataccaatttcttccatttcacttaaaatcttagctagcggtagctctaaatcagccaagagttctacctgattgtattcttctaattgtttatccatatttggtttcgcaaagtaaattgcatcagtaatagaagcaacatatggatttaaaacatcatcttcaggtaccttaaatttcttaccttttccatatatactcacatcgtctttcacaaaactttgaccgtacaatgaaacaactgattgaacatcactaatcgtacgagatggatcaattatataactggccaacataatatcgaaagaaatattttgaatatcaatccccaatctatgtgatgctacatatgtttttttagcatcatatacgacttttttcgaattcggattttctaaccatgaaactagttcgacataattatttatgtcatccgcattaattacaatatgtttctcacctgtaaataaagagaattttaaaatattatttcgcaaatagttaccaccgtctaattcgaaatggatggccgcttctttcaatgaagtaaaatcaatattatcaaaagacgtttcaatttcaaatgtcttttctattgcatcttcaacgcttgctgattgatcaatgtcagccaacaattgtttgaattctaacttcttaaacaattcgattttttcttgttgttcatcttgatgagtcattaacgtatcttcaagttttacttcaatcggactatctacattaatcgttgctaattctttactcattaatgcatcttctttgctattttgaagtttttcttttaactttttacctgaaatttcatctaaatgttcatagacaccttctactgtgtcaaattggtttagcaattttattgctgttttctctccaacacctgcaacacctggtatattatcagaagtatctcccattaatcctttcatatcaataatttgattaggtgttaacccgttgtatttttccgcaataaagtcaggtgtataatgatcaacatcagtaacaccttttttagtgtaataaatggttacattatccgttgcaagttgtgttaaatctcggtctcccgtaataataattgtctgaaagcccgctttatctgcttctttacttaaagttccgataatatcatctgcctcatagttatctaattcataacgtttaatatgataagcatctaataattggcgaatataaggaaattgctcacttagttcaggcggcgttttctggcgtccacctttatattcactatatttttcatgtctgaaagtcgttttacctgcatcaaacgctactaaaaaatgatttggcttttcttcttttaaaatcttctctagtaacattgcaaaaccatatactgcattggtatgaatgcctgctttgtttgataacaaaggtaatgcataaaaagctctaaaacttaagctattaccatcgattaatactaatttattcacaattttaacctccagaactaatttatatatattttagcatattcgactgtgatgtcgtaattaaagaaactatctcatagagtatttatacacgacctaatttcaaataaaacaagtgcctatatagacttagctaaaaaataaaaaagacataatcatgattgttcttgatgagcactccataaagtcaggttaaaagtccaacttttgagatgcacattatcatttcatgattatgtctactttttaatatttttatgctgctattttaaatttttataggtaagaataagttatgaatcgtctgaaccaaatggaatatatttaactttggtcattttcggtaattcttcataattattaaaccactcttggtaatttttattgattggtgacggatgatgcatataatgttcaaacggcaatgattccactgtataaacctcttgtcgtggatgatctttaatttgttgttttaataactgaactcttttttcatgttcataatgaacataaataaatgcactaagatatatcacagctaaaactagtgatgcacctttaataaaattaacattgattgacttatatttccgaaattcttttaataaaataattaaaatgattacatgtatcgtataaacaatcaaaaaattacctggttctattggagtaacaatgactagtgtcgacgccgaaacacatattgcaataagtaaggaatataaagtgatttgtgttttacgatcattaatagacaaataaatacctacaaatatcgaaaacgcaaagtaaccacatacaattacgttcacaaaaccaaccaatccaatatctgtatttttatttaataaaaactgattgtaaaatagtaaataataaagcggtaaagtgataaatcctatcataatgatacgacgctttaatattgttaaatgtacataccgatcacttctaagcagtagataaataataagcgctgcaatcatacttaaaattataatctgactgaaaatgacaccatatggaagtgacgttgatatcatttctgcaaattttgaaaagataccttgattatttgaaacttgttgatattctgatccttcaaataaaattttgcgataatttggattggaaaacataatgattgtacctatagtagcaatcataaatgaaaacaataatttataattaagtgttcgatttgcagtaaattcatacagaaaagctaaaattaaaatgatacagtggaataatgtcacattctccataaataattgaccgaagaagcataaaacatagaatagtacagtaacacttaccggctgcttttctttatatataattgcattaatacaataataaataataaagagtgaaattagtgttgatgtcgcataattataaaatcctgcaaaccagccatatgtatctgcataaatagcacttggtaaaattaacattaaagaaaatgctaacaaataatagcttgtccacgctttacaacgtgtaatgtgcataatcatccaaatgatgcccatactaatgaggccatatgaaagccaacgtaaccagcttacatgtacagctataatttcaaagatatttccgatatagcgaccattaagtgatgcaaatcctacttttaaaatatcagtattataattgctaaaccattgtaaatcatcgtgcatgagtggtagtaagatacccataaaagtataaaacaataatatcgcaattaatatcaaagttgtcttgtgtaattgaattgttttcactttgctaatcctcaaatctagttaaattttcctcaacttgtaggtcgaaaaattaattcaatatttttaatgtatttctaattttcacctatgcatgtttcctcaatcaaattagataaacaaggtatttaatattactttcaacaatttatctaaatcgcccctcgtctttttctatgacgaatgattacacttgtctattcaagtgtttaaattaagatttatttccgttcaaataaaacttattactttttaattaagcatctatttcaagcgcgttactaaaatttctttattataataaatatattataaaattgcttgattcacaacaatctattacttataacttacaaatcgacatatacaaatgacaaaattgacaaccgaatttattccacttcattaactctaatttaataccaatagagatttgaacgaaataaaaaagcagcaacaacttcgtgaaaaatacacgcgctgttaccactttaatttttattctttataatcttttagaataactttgaacgttgagcctttgccaacttgactattcacttcaatattgccttggtgggcctctactatatgctttgtaattgataatccaagacctgtcccaccagaatctctacttcgtgctttatctactctataaaatctttcaaaaatacgttgttggtcttctaatttaatacctataccaaaatcttgtacttcgaaaatgacacgaaagtcatctcgatacacacgaacgttaatatctccatcttcataagaatagttaattgcattcgttaacaaattcgtgataacttgagcaattttactttcttgtgctttaacaatgacatctttttcaatatcagtatgaatggaaatatttttttgattggcttgagtcatcatattatcaataatacgccgcgttaaatctgataaattcatatagtctgtatctaactctgtatgttgctcaatatgcgataaatctaacagatctgttactaaagattctattcgatttgattcttttaaaattatgtttaaaaacatgtctaatgattccgcatcattttttgcaccatcaataagcgtttcagcaaaccccttaattgaagtaataggtgtttttaattcatgtgaaacatttgctacaaattcacgtcttagattttcaagttgtttcagatttgttatatcatgcatcacaactaaaatcccttgcaaacttttttgagacctagttaaaatcggaacgcatgaaatatcaaagtacttggcatggacttggtttattgcaacttccaattgttcataaataggtttttcaactttaaaactttctaaaattaattgctcaatttcagtattaacatagccgtgatagcctacttgttcaatattatgcgagatgttgaactgttcataatacgctttatttgcaacaacgatttttccatttcgatctatcattaaaatagcacttggaatattttcaatcgttgtttttaaacggttggattgaattttttgctcattattaagcttttgaaggcgtcgtgctaaatcattggtagacacaaaaagcgctttagtttctacaacattactttcaggtacacgtatgtgataataaccatttgccaacaattgtgttgcataagtaacttcttgaatgggacggattaatgtacgcttaaaactacggcttgcaaaatacagacaaatgagtacaactaaacatgtcaaaataagatatttccacaacgtccaatgcatttctgtaatatcgttattgtaacctttaatccatacatgataaccgttaaccttcttattaaaaataaaaacgtcccttttttgaatatagctatcactatttgggatagctttcagtttgccactactaaacacctttttatcatgcttagttatcaataaatctatattttgctgttttacaatttttttaactttatcaatctcattatcttggactaaataaatatatgatcttgcatctgttgctagagcttgttcgtgtttttctgataaaacatatgtgatggaagcgtgaataataatgcctaatgtaacaaaactgataattaatatactgcttatcaataacattaagcggtggtgaaacttcatcattgttctttaggtctttccaatttatagcctaagccacgcacagttttaataagttgtggcttcttaggattatcttctaatttatctcttaaatgactgatatgtacatcaacaattcttgagtctcctgcaaattcataattccataccgtatttaacatatgctctctcgtaatgactctgccttgtctttctatcaaataaagcaagagttcaaattctttcggtgttagctccaataactcattatgcttatatacttcaaaataatcgggtctaatacgtatcgatccgatggtaatatcatcgtcaatctcttctacttcttttacaaattgagaacgtcttaaaatggctttcacacgggcaacaacttctctaggtgaaaaaggcttagtcatatagtcatcggcacctaattctaaacctaatacccgatcaaattcatcatttttcgccgttaacattaatatagggactaaatttttatttgttcttacagtcttacatacgtcaatgccatcttttttaggtagcataacatctaaaataattaaatctggctgttcactttctaccttttctaaagcctcatcaccatcaaatgcgacaacaacttcataaccagctgtttctaagttatatttaagtaatgttacgattgaatgttcgtcatctactaccaacactttttgcgacatggtatgcctccctaacttataattatatttacattataaccgaactatttataaaaataacatcctacacattatctttacacattttttacattactttacatataaataaaatacttcttatatttccttctatcatttgcatgacttactctgggacaacgaaataaattttgtaaaaatagcatttctatcccactacctatgcatgagttttactcatttattcctaagcttatgtacatattcgctttgtctaatgtgtaagaaacactacataatcaatcattggtgactctttattatttctatcctgttgccaacttcaattcatttaaaaaggcgaacctagcaattaaagttgctagactcacctaattttattttgcttattttaaatttttaatcaattcatctgcaaatgctgatgtagaaacttcttcagcaccatccattaaacgggcaaagtcataagtaacaacttttgaagcaattgtatcttcaattgaatctgtaatcttatctgccgcttcttgccatcctaaatgttctaacattaatacagaacttaaaattactgaagatggattcactttatttaaacctgcatattttggagctgtaccatgtgttgcttcaaaaatagcatgacctgtttcataattaatgtttgcacctggcgcaataccaataccaccaacttgtgcagctaaagcatctgaaatatagtcaccattcaagttcatagttgctacaacatcatgctcagctggacgagttaaaatttgttgtaagaaaatgtcagcaatagaatctttaatgataatcttgccttctttttcagctttttcttgagcagcattagcagcatctctgccttcattttcaacaatttcgtcatattgttgccaagtgaatacttgatcaccaaattcagataatgctaaatcgtaaccccactgcttaaatgagccttctgtaaatttcataatattacctttatgaactaaagtaactgatttacggttattatcgatagcatattgtatagctgctctaactaatcgctcagttccttctttagaaactggtttaataccaatacctgaagtttctgggaatcgaatgtttgtcgcacccatttcgttttgtaagaagtcaattacctttttaacttctgttgtaccttctttaaattcaataccagcataaatgtcttcagtattttcacggaaaataaccatatcaacatcttgtggacgtttaacaggtgatggtactcctttaaaccaacgtaccggtcttaagcaagtaaataaatctaattcttggcgtaaagccacatttaatgatctaataccaccaccaattggtgttgttaaaggtcctttaacagcaattaaatattctttaattgtatcaagtgtttcttgaggtaaccattcaccagttgtatcaaatgctttttggccagctagcacttctttccattcaatgcgtttttcgccattataggctttctcaacagcagcatctataactcggcttgctgccttccaaatatccggtccaattccatcaccgataataaatgggataattggttcattaggtacgtttaatccttcagttccttgagtaattttttctgcagtcatagttattttacctccaaattttacatcttcatttttaatttgtattgattattttctttcttcaagcgggatatacttacgattcgtttcgccaatatatttcgctctaggacgcataattctattatctttatattgttctaaaatatgagcaatccatcctgcagaacgacttacagcaaagattggcgtgaataagtcatgaggtatttccatacagtgataaacactcgcactataaaaatcaacattaggaattaatcctttttcttctgccatacgtttttccattttcactgacatttcaaataattcttcacgaccagcgtctttcgtaatttgacggctcatttctcttaaatatttcgctctaggatcaccatctttatatacacgatgaccgaagcccattactttatctttattagcaaatttttcatctaagtaagcatcaacattttcaattgacccaatctcagataacatcgtcataacttgttcgtttgcaccaccatgtaatggccctttcagagaacctacggctgctacaatacctgagtacatatctgacaatgatgataccgcacaacgtgccgtaaatgcagatgcgttcaactcatgatcagcgtgtaaaataagtgctttattgaaggcttctacttctatatctgttggtaattccccacgtaacatatataggaagtttgccgcataacttaagtcaggattaggcttaagtggttctttatcttgtcttactcgagcaaacgctgtaactaatgatgctactttagcctgtatacgcattgctctttcataacgattttcatctgattcattttcagcatcaggatcgaaatgtgcaatatatgataatgacgtacgtaatgctgtcattggatgcacgtgatctgtaacatactcctcaaaatgtgtatacacacgaggatttaatgtcatgtattgatttaatttcccttttagatgagcaagctcttcttcgtttggcaatctatagttccataataggaaaataacttcttcaaattgcgcattttcagctagatcatcaatatcatagccggcataagtcaattgactttcaataattgaacttattttagtctccgctgcgataaccccttctaaacctctttgtaattctgctatgataaatttcccctttactgtttctttatgaaatggctttcaactaatattatagctaaacgcatttcgtttgtgaaatataaaaactggcattatatgtgcaacaatttttttgtaaatctatgtaaatgtcacagaatagccacaaatagcaccattaaagctttttcaagatgtgaataatccatgaattttacaatagaattaaattttcaattggttattatatatgattataaaaaccaaagtatattaacatggaattttacacatttttaccgaaaataattgtatatatctcaatataagtgcataataaacatatctatatttaagggagatgtattatggctgaaaaattacaaagggaactgagcaatcgccacatacaattaattgcaattggcggtgcaattggtacaggcttattcttaggtgctggtcaaacgattgcattaaccggcccttcaattctattaacatacatcattataggatttatgttatttatgtttatgcgaggtttaggagaaatcattatacagaatactgaatttaaatctttcgcagatgtaaccaatacatatattgggccttttgcaggatttgttaccggatggacatactggttctgttggattattacaggtatggctgaagtaacggctgtggcaaaatatgttagcttttggttcccagaaattccaaactggataagtgcactattttgtgtactgttattaatgtcattcaacctacttagcgcaagacttttcggagaattagaattttggttctctatcattaaaatagcgacaattattggtttaatagtagttggtttcgtcatgattctatttgcatttaaaactcaattcgggcatgccagtttcacaaatctatatgaacacggcatattcgctaaaggtgcttctggattctttatgtctttccaaatggcactattctcatttgtaggaattgaaatgattggtgttacagctggggaaacaaaagatccagttaaaacaattccaaaagcaattaacagtgtacccattagaattttaatattttacgttggggcgttagcggttatcatgtctattatcccttggcagcaagttgatcctgataacagtccattcgtaaaattattcgcattgatcggaattccgtttgctgcgggcttgattaattttgtagtattaaccgctgctgcttcatcatgtaacagtggtatattctcaaatagccgtatgcttttcggtttatcaagtcaacaacaagcacctccgaacttttctaagacgaataaatatggcgttccacatgttgcaatctttgcttcatcagcattattacttgtggcagcattactaaactatattttcccagatgcgacaaaagtatttacgtatgtgactaccatctctacagtgttatttttagttgtatggggtctgattatcattgcatatatcaattatagtcgtaaaaacccagatctacataaaaatgctacgtacaaactattaggtggcaaatatatgggctacttaatatttgtattcttcatttttgtgttcgggttattatttattaatgttgatacaagacgtgcaatttattttattccgatttggtttatacttttagcatttatgtacttaagatataaacgtatcgctgctaaatcaaataaataacaacaagttttagggcttgggacattaagttcttaggcaatgtaaaaaagctgatttctattaattatttgatagaaatcagcttttttgatatgtattttataatgtacagctcgttgagctgctattttccttatattaagtgccatcaatacaaaacctagctctcgtttaactttatttattcctcgaactgacattcgagtgaaacccaaaatagccttcataaatccaaaagcaggctctacatcaatttttctttgactatagatgtttttcgtttctggttcagaaagcttttgattaatttggactttaaagtattcccaattataattcttcatgattttcttattggatttcgaatttggtttcatgcattgatgtctcaaagaacatgatgaacagtcatcacattcatatagtttgaagtctcgtttaaaaccatatctatcattacggtatgcatatcttttaaaacctattcttttgttattaggacatataaattcattattaagttcgtcatatttccaattttgagtgttgaaaatgccacttttaaactttctagttttatctttaataaacatgccatacgtaataagtggcgttttattaaaatcatctataatagccatatagttttgctcactaccataacctgcatcagctacaatatactctggtaaataaccgaaggtattttgaatcattgttaaaaatgggattaatgttctagtatctgttgggttttgaaataggtcataggataaaacaaattgagaatttgtcgctatttgtaaattgtatcctggcttaagttggccatttttcatatggtcttccttcattctcataaaagttgcatcatgatcagatcagttttagaaaaactatttctatctttaagaatcgatttttgttcttcatatttattttttctttcggaataatcatcaaatttctttttgaacttcttaatctcagttatttttttacgggtctgttttctaatttgagcacaatcttcgttctcaatagaatgatttaaatcttcgatttctttatctaaatgactaccaattaaatctatttcttctattgttaaatcgctatctccatcttcttttatctctggtattattttttcttcaactaagtcacgatataatgtttttgaattttcgttcaatttcgattcgtgattttgaatacttttcttccacacaaatgtatatctattggcattagcttctacttttgtaccatcaataaaaattgaattattatcaataagattttgctttaaacattgactatggaactgaataaataaagattcaattaacgcatcagtattaggattcactctaaaacgattaatagttttataagaaggtgtttgatcttgagctaaccacatcattcgaatactgtcatgaagtaatttttctattctacgaccagaaaatacagattgagtatatgcatataagatgatttttaacatcatttttggatgataggatgttgcgccacgatgatgtctgaattcatcgaattcgctatcaggtatcgtttcaacaatttcattaacatatcgcgaaatatcattttgaggaattctaacagaggtttctattggtagtgtaagttgggtcatgttataaattttatacataaggcacctcgttaatttagtttagtggtatttattaaattatacgaagggacccaacacagaaaattcattttattgaattttacatttatgtgcaagttgggcaaagtgttttatttttttaaagtatgtaaaagtaaaattacatgttaatacgtagtattaatggcgagactcctgagggagcagtgccagtcgaagaccgaggctgagacggcaccctaggaaagcgaagccattcaatacgaagtattgtataaatagagaacagcagtaagatattttctaattgaaaattatcttactgctgtttttttagggatttatgtcccatcctgttttatatgcaacttataatattaaattgcgtacttggctcaaaacttttactttctcatctatttaataatgtatcatttcagaaatacatccatacttctattttataataaatttccaaagtaatatgagtgaaagtttgaaggtgataatgtacatgtataaaagatataaacatttatatagattgccattcatacactatcattatcaaataacctattaattacgtcataaaataccagatgaaccaaaaaacgcctttccattgttgataaatggaaagacgtttttttataaattatagtacgtttgcatatccttcaaagattttaccttgagcagcatcaatcgtaactaacatgttattgcttatgtttttaacagctttttctacacctacaactgttggaatacctttttctaaaccaacaattgcacttggtgatgtaataccattttcttctgtaattaagcctaaagctttttctacataaggtacaaacgtttcatcgattgagttagtaacgataactttgtcagataaatctttaccttctaaatctttaacagtttcagcaactaacgtagtaccaacaactgatccacgtccaataccttgaccattagcaatttcgtcaccaactaggtggattttcatcatattagtagttccagtttcaccagttggtacaccagcagtaataatgattaaatcaccattagatactctaccagtttcaacagctgttgcaactgcattgtttaacaatgcatctgtactcttacgtccttttttaactacaggttgaactccccaaacaattgaacattgacgtgcagtttcttcacttggagtcaccgcaataatgtctgaatgtggacgatatttggagatagtacgtgccgttgaaccactttcagtagcagctacaattgctttaacatttaagtttaaagctgtatgtgcaaccgaaataccgatagcattcactaatgaagtttcaactaatttagtacgatctgacaataactttttgtaatcttgggctgcttcagctgatacagcaatatttctcattgttttaacagcttcttcaggatataaaccagcagcagtttcaccagataacattactgcatctgtaccatcatagattgcgttggcaacgtcactagcttctgcacgtgtagcacgtgggttacgttgcatagaatctaacatttgtgtagctgtaataactggtttacctaatttgttacattgtctgattaaatctttttgaaccattggtactttttcaggtggaatttcaacacccatgtcaccacgtgcaaccattaaaccatcagacacttcaagaatttccgcaatattatcaataccttcttggttttcaattttagggaatactgaaatgttagctttttgttcttctaaaatttcacgaatttctaaaacatcactaggacgacgtacgaaacttgctgcaatgaagtcaacattttctttaataccgaaacggatatcttcagcatctttttctgtaataccaggtaaacttactcttacgccaggtaagttaacaccttttttgtttttaagctcaccagagtttaaaatatcacatttaacttcttttttagcatggtcaatatctttaacttgtaattcaattaagccatcatcaagtaaaatgtatgaacctacttgaacatcgttaattaagttttcatatgttactgagaacttttcaggtgttccttcaacttcattcatgctaacaataacttcgttgccacgttcaagttcaatgataccgtctttcatattatgcgtacgaatttctggaccttttgtatctaataaaattgctacaattttgtctaatcttttagctactttacgaattgtatcaattctacctttatgctcttcatgactaccatgtgaaaagtttaatcgtgcaacgttcataccagcattgattaatttctcaatcatttcttctgattctgaagctggtccaattgtacatacaattttagtttttctcattttataattcctcctgaaatcttatatagataacttgttagcaagttcatatagactataatcaaatttatgatctttaccatcaaaaatttcatcaaaagatgttgctacaattttattgttcttaattccaacacccttagctgtttcaccttgcattaataagtctaccgcatatccacctaaacgtgatgctaaaactctatccgcacctgttgggctaccaccacgttgaacgtgacctaacacagacactctattatcaacattgatgtattgtgataattctttttgacaatcttgcgcagtcatacaaccttctgctacaagaacgattgagtgtttcttaccacgtttaataccttgttcaattttatcagctatttctttaatatctgttttcacttctggaactacaattgtctcagcaccaactgataatccagcccataatgctagatctccacaatcacggcccattgcttcaatgataaatgttcgtgcgtgacttgacgcagtatctctaattttgtcgactaagccaataatcgtatttaatgctgtgtcaaatccaattgtaaaatcagtaccattgatatcattgtcaatcgtaccaggaataccgatagtttgaatttctttacattcctcactgatgcgttgtgcaccgcgataactaccgtcaccaccaataactacaaggccctcaatccctcttttacgtaagttttcgattgcaactttacgtacttcttgctccttaaactctggacatcttgctgaatacaagaatgtacctccacgctgaatcgtatccccaactgatcctaattcaagtttatgaatatcatcatttaacaatccttggtaaccatgatacacaccataaacttcaatttcattgtaaattgctgtacgaacaactgctcttacggcagcattcattccaggtgaatctccaccactagttaaaactgcaattttcttcatgacgacatacctttctataactgatttatctttaactctaaattaccacaaattgatatgtcattccatcaaaactaatgtattgaattgatgtaaacgttttaaatattgaattttattttaacttaattaaaaaaagattagtagccacaattttgactactaatcttagttaaaattcagtatctaaatattaaattattgttttaatgtacttcaatttatggtaaaacccagtatcgatttaacataaaaatgctcaagttgattattctatataagaaccgatatttctgaatttttcaaagcgatcattagcaatttcatcacgtgataatgactcaagtgaatctaactgtgcaacaaacgctgatttaatagctaaagcttgctgttcaatatctttatgtgcaccgccaagtggttcagaaatgacatcatctataatacctaattgcttaatatcatgggcagtaattttcattgtttcagctgcaattttagccaaattactgtctttccataataatgccgctgcaccttcaggagatataacagagtaagtactattctctaacatcaatactttattggcaataccaatacctagagcacctccactgccaccttcaccaatgacaatcgcaataactggtacttttaatgaagccatctcaatcaaatttgttgcgatagattcactttgtccacgttcttcagcagctttaccaggatatgcaccttttgtatctataaatgtaaagataggacgattgaatttttcagcttgtttcattaaacgtaatgcttttcgataaccttctggatgcgccataccaaaatttcgataaatattatcttttgtatcttttccacgttgttgtccaataactgtaacagcacgaccatttaaaaagccaataccaccaatcattgctggatcatctctaaaattacgatcaccatgtagttccataaacgaatcaaagatatatggaatataatctagggtcgtaggtctttcttgcaaacgcgcaatttgcacacgatcccatggttttagatttgtatatatttttttagtttctcgttccaatgacgcttcaagcatgtcaatttcttcttgtaaatccacatcatttttatcttgagattcttttaaagattcaattttatttcgaatttcaaaaagtggtttttcaaaatctaacattatttagtcacctcttgatggatttttagaatttcagacaatgtttgacgcatatcattacgatgtacaactttatccaattgtccatgctctaataaaaattctgcagtttggaaatcatctggcaatttttcgtttattgtctgttcaataactcgacgacctgcaaaacctatcaacgcttttggctcacttaaatttatatcaccaactgatgcaaaacttgcagatacaccaccagtagttggatgtgttaaatatgatatatataatagtccagcgtcagaatgacgttttaaagatacactggttttacccatttgcatcaaggaaataataccttcttgcatacgtgcaccaccacttgcagagaaaagaataaatggtaaacggttctcagtgcagtaatcaatgatgcgacatatcttttcaccgataaccgatcccatacttcccattctaaaacgtgaatccatgacagcaacgccaaatttcataccatctagttgtgctgtaccagtcacaactgcttctttaagacctgtcttttgttggtccttttcaattttttctaaataacttggaaaatctaatggattcgcagaggtcattcccttatcgaattctgtaaatgatccttcatcagaaattgcttctatacgtttatacgcagttaaagcaatatgatgatcacaattaaagcacacatttaaattttcagctaattcttttgtgtacataattttcttacactttggacacttagtcataatacctgcaggcacatcattatttttagagtcttgtactgtaagatatttctttttctttgttcgattaaaaaaatctttaaacataggaaaacctccaaataacctctgttctaaccatttagagccttaaactgaacttgaccagttaaaaacgggtttaaatttatttgatttatattcgtttgactgttgaatgtttatcataaactttcattttcatcattttaatgactctttattgctaacttttaagcaatttaattaaacgttaattatttttattgtaaatctgtaagtttcattgttttatcatacacatcttgcggatcaacttcaatcctagctactccagattccattgccgctttagcaacattacgagcaactgatggcgctacacgtttatcaaacggtcctgggatacagtagtcttcatttaattcagaactatcgattaaatcagcaatcgcttctacagctgcctttttcatttcttcatttatatgtgtagcttcaacctctaatgcacctctaaaaataccagggaaagctaatacattattaatttggttaggatagtctgaacgtcctgtaccaacaactcgtgcacctgccgctttggcatcatcaggtattatttcaggatttggattagccattgcaaatataattggattatctgccatactcttaaccatatcttgtgacagcgcattagctacagaaaccccgataaatacatctgcgtcttttacgacttcttctaaagacccttcaatcttatctttatttgtccattttgctacaacatctttcgtaggattcataccatatgaacgtccttcaaaaattgcgcctcttgagtcacacataaccatatttcttacaccatacgcgtatagtaatttaacaatggctattcctgctgcaccagcaccatttagtacaacttttattttagcaatatctttgttaacaactctcaatgcatttaccaaacctgccaatgttacaattgctgtaccatgttgatcgtcatggaataccggaatattagtttcttttttcaatcgttcttcaatttcaaaacaacgtggtgccgaaatatcctctaaattaataccaccataattaggttctaacaacttaactgttttaatgatttcttcggtatcagttgtatttaacgcaataggcaccccattgataccagcgaagcttttgaataatactgctttaccttccattacaggaatacttgcttcaggtccaatgttacctaaacctaataccgctgttccatcagtaataactgcaactgtatttcctttaattgtgtaatcatatacttttcttttatcttcataaatatctttacacggttcagcaacgccaggtgagtatgctaaacttaattcctctttattagtaacttttacatttggtttaacttctaatttaccttgattacgtttgtgcatttccaatgcttcatctcttaatgacatgaaatcagcccctaattcaatatttatttttaaaaaataacttggataaaacgcattacattataaaagtaaaaatattgggtaaatctgaatgagtaagaatttatggttttgattatgtaacacaaatagcgataaacgataataaaataatatttataaagatacattaaaccatactatctaaagatatacctttaattattataatggatagcaaaaaccaatatatcaaaaagttattatttttccgcacgatatatcgacaaaattctttactcaatttatgtatactgctttttgtgctaattattcttatggattaatcaataatgtaaagtgaaactcataaaaataataagcataaaaaactaatataaacgcaaactgatggttaaaaaatatctaaccatcagtttactatatcataatttattagttgataaaagttatataagcctaatatcactagggttaaaggattgtataaaattattaaacatactatctttttgattaatatagcctaaagtagtcatttgtttaatcgtttcatcataaaaggataacacaacatcattagcattctctttcgtagctttaatcatctcttcaaacatatctatttgtgatttatttctaattataatttgtttggcaaatgctaatttttgttcttcaaaagtggctaatgtctgaatctcatttataattagttgacgttgttgctttctatggtcaaatttcccgctaactataaacaagtcattatgtgataacaactcttcgtactttttaaactgattagggaaaatcacaccatctaaagtttcaatgccatcatttaatgtgacgaatgccatattttgaccatttttagttcgaatttgtttaactttatcaaactgtactaatataggtttataattctgcgcgttactcaatttaaatatcgttaaatattgtttggcaacaaactttttatctactgggtgttgcgaaacataaaatcctaaatattctttttcgtactgactaataagtgcatcaggcaattcttctttatcttcatacatctgttttggcgttaaaatatcaaataaaaaaccatcttgttcaatgtttaaatcgccatccaacacttgatcaatagcttgcaacaacgttgaacgtgttttaccaaaagcatcaaacgctcccactaaaatcagtgcttcaagtaactttctcgttttgactctcttcggtatacgtctagcaaaatcaaagaaatctttaaatttgccgttctgataacgttcatcaacaatcactttcacactttgataaccaacacctttaattgtaccaattgataaataaatgccttcttgggaaggtttataaaaccaatgactttcgttaatgttcggtggcaatatagtgataccttgtttttttgcttcttctatcatttgagcagttttcttctcacttccaataacattacttaaaatatttgcgtaaaaataatttggataatggacttttaaaaagctcataatgtatgcaattttagaatagctgacagcatgtgctctaggaaaaccataatcagcaaatttcagaatcaaatcaaatatttgcttactaatgtcttcgtgataaccattttgctttgcaccttctataaaatgttgacgctcactttcaagaacagctctattttttttactcattgctcttcttaaaatatccgcttcaccataactgaagtttgcaaatgtgctcgctatttgcataatttgctcttgataaataataacaccgtaagtattttttaatataggttctaaatgcggatgtaaatattgaactttgcttggatcatgtcttcttgtaatgtaagttggaatttcttccattggacctggtctatacaaagaagttacagcaacaatatcttcaaagtgttccggctttaatttttttaatacacttcttacaccgtcagactctaattggaatatgccagtcgtatctccttgcgacaacaattcaaacactttttgatcatcaaacggaatcttttcgatatcaatattaatacctaaatcttttttgacttgtgttaagatttgatgaataatcgataagtttctcaaccctagaaaatctatttttaataacccaatacgttcggcttcagtcattgtccattgcgttaataatcctgtatcccctttcgttaaaggggcatattcatataatggatggtcattaataataattcctgccgcatgtgtagatgtatgtcttggtaaaccttctaactttttacaaatactgaaccagcgttcatgtcgatggtttcgatgtacaaactctttaaaatcgtcaatttgatatgcttcatcaagtgtaattcctaatttatgtgggattaaacttgaaatttcatttaatgtaacttcatcaaaccccataattcttccaacatctctagcaactgctcttgcaagcagatgaccgaaagtcacaattccagatacatgtagctcgccatatttttcttggacgtactgaatgaccctttctcggcgtgtatcttcaaagtcaatatcaatatcaggcattgttacacgttctgggtttaaaaaacgttcaaataatagattgaatttaataggatcaatcgttgtaattcccaataaataactgaccagtgagccagctgaagaaccacgaccaggacctaccatcacatcattcgttttcgcataatggattaaatcacttactattaagaaataatcttcaaaacccatattagtaataactttatactcatatttcaatcgctctaaatagacgtcataattaagttctaattttttcaattgtgtaactaagacacgccacaaatattttttagctgattcatcattaggtgtctcatattgaggaagtagagattgatgatattttaattctgcatcacacttttgagctataacatcaacctgcgttaaatattcttggttaatatctaattgattaatttccttttcagttaaaaaatgtgcaccaaaatcttcttgatcatgaattaagtctaattttgtattgtctctaatagctgctaatgcagaaatcgtatcggcatcttgacgtgtttggtaacaaacattttgaatccaaacatgttttctaccttgaatcgaaatactaaggtggtccatatatgtgtcattatgggtttcaaacacttgtacaatatcacgatgttgatcaccgacttttttaaaaatgataatcatattgttagaaaatcgttttaataattcaaacgacacatgttctaatgcattcatttttatttccgatgatagttgatacaaatcttttaatccatcattatttttagctagaacaactgtttcgactgtatttaatccatttgtcacatatattgtcataccaaaaatcggtttaatgttatttgctatacatgcatcataaaatttaggaaaaccatacaatacattggtgtcagttatggcaagtgcatcaacattttcagacacagcaagtcttacggcatcttctatttttaagcttgaatttaacaaatcataagccgtatgaatatttaaatatgccaccatgattgaatggcccctttctattagttaagttttgtgcgtaaagctgtagcaagttgctcaaattcatcccagctgtccactgaaactcctgacgcattcggatgaccaccgccaccaaaatcttgcgcaatatcattaataatcaattgccctttagaacgtaatcgacatctgatttcattaccttcatcgactgcaaatacccatattttcaagcctttgatgtcagcaattgtattaacaaactgagatgcttcatttggctgaataccgaattgctccaatacatcttcagttattttaacttggcagaatccatcatccataagttcgaaatgttgtaaaacataaccttgaaacggcaacatttttgggtccttctccatcattttatttaaaagcgcattatgatcaatatcatgcccaattaactttccagcaatttccatagtatgttctgaggtattgttaaaaaggaatcgcccagtatcaccgacgataccaagatataaaacgctcgcgatatctttattaacaattgcttcatcattaaaatgtgagattaaatcgtaaatgatttcacttgtagatgacgcgttcgtattaactaaattaatatcaccatactgatcaactgcaggatgatgatctattttaataagtttacgacctgtactataacgttcatcgtcaattcgtggagcattggcagtatcacatacaattacaagcgcatcttgatatgttttatcatcaatgttatctaactctccaataaaacttaatgatgattccgcttcacccactgcaaatacttgcttttgcggaaatttctgctgaatatagtattttaaaccaagttgtgaaccatatgcatcaggatctggtctaacatgtctgtgtataataattgtatcgttgtcttcgatacatttcataatttcattcaaagtactaatcattttcatactcccttttttagaaaagttgcttaatttaagcattagtctatatcaaaatatctaaattataaaaattgttactaccatattaaactatttgcccgttttaattatttagatatatatattttcatactatttagttcaggggccccaacacagagaaattggacccctaatttctacaaacaatgcaagttggggtggggccccaacgtttgtgcgaaatctatcttatgcctattttctctgctaagttcctatacttcgtcaaacatttggcatatcacgagagcgctcgctactttgtcgttttgactatgcatgttcacttctattttggcgaagtttcttccgacgtctagtatgccaaagcgcactgttatatgtgattcaataggtactgttttaatatacacgatatttaagttctctatcatgacattaccttttttaaatttacgcatttcatattgtattgtttcttctataatacttacaaatgccgctttacttactgttccgtaatgattgattaaaagtggtgaaacttctactgtaattccatcttgattcattgttatatatttggcgatttgatcgttaattgtttcacccatctgaggctgtcttcctaaaagttgcatagactttaaaacatcttgtctattaatcacacccactgtctttttattactcgaaacgacaggaatcaattcaataccttcccaaatcatcatatgcgcacaacttgctactgtactcatagcatttacataaataggatttcgcgtcatcactttatctatttcgtcgtcgtcctttgtattaatcatctctcgacttgttacaatacctactaatttatacgactcattgactaccggaaatcttgtatggccagttcgattcgccatacgcttataatctgctattttcatcgtatcaaacagcacagataaatcatctaatggcgtcattatatcttgaactattaagatatcttttcgtattttctgattaaaaagtgctttgttgataatatttgcaactaggaatgtatcataacttgatgatagaacaggtaaatcatgttcattcgcaaaattaataactttattagatggcttaaatccaccagtaattaatatagccgtacctctttttaaagcttcaatctgcacatcttcacgatttccgacaatcaataatgtctttggaccaatatactttaaaatatctttgagttccattgctccaattgcaaatttagataccatcttagtgatacctttgttgccacctaacacttggccatcaataatattgacaatttcattaaaagttaaatgttcaatttcattacgattacgtttttcgattcgaaccgtaccaacacgatctatcgttgcgaccatgcccattttatcagcatctttaattgcacgatatgctgtcccttcagatacgtttaaaaatttagcgattttacgcaccgaaattttagagcctatagataacgattcaatataatctaaaatttgttcatgttttgtcattctttacctcttcttttcgaacagtattaactacattataactttattttggataaaaagcattgaagtgaaatgaaataatgatcgtttcacctattttattttttgaaaatatacaacaaacacaaagatcacaaaatctttaattttaaatggaaaaatccattattatttattagaatgtaagtgaggagggatgtactaatgtataaaaatatattacttggtgtagacactcagttaaaaaatgaaaaagcactaaaagaagtgtctaaattagctggcgaaggtacagtcgtaacagttttaaacgcaatcagcgaacaagatgctcaagcatcaattaaagcaggtgttcatttaaacaaacttactgaagaacgaagcaagcgattggaaaaaacacgcaaagctttagaagattatggtattgattatgaccaaataattgttcgtggtaatgcaaaagaagaactattaaaacatgctaatagcggtaaatatgaaattgttgttttaagtaaccgtaaagcagaagacaaaaagaaatttgtacttggaagtgtcagccacaaagtagcaaaacgtgcgactatccctgtattaatcgttaaataaaatttttatccagaatcacaaataatctttcaatcatgatgcagtctcaaacgactgagtaaatacaagaaacgattatgactgtggttctggattttttatatcgtagtaaatttataatcaatgtctaattgtataaaactaaaattacgagagtaggtcagaaatgataaagaaccactgatgtcccccgtccacgtcgtaactgaatcagtagaatataaaaacacccactaaaaatatgcagacgataacttccacatagattagcgaggtgttttttagtgtaaaatctatattctatttaaaactgaacagattcacctggttttaaaatttgcacgtcccctacattaacagcatctttaaattgttgtggatcttgttcgattaatgggaatgtatcataatgaatcggtacagaaatttttggtttaataaattcattaatagcataacttgcatcatcaatacccatcgtaaaattatctccaattggtacaaaacatacatcaactggatgacgtttcgcaataagtgacatgtcactaaacagacctgtatcaccagtatgataaattgtttttccttcaacttcaaacacgatacccattggcatacctaaataaactggaataccattttcatgtgtaaaacttgaactatgaaatgcttgaacaaatttaacgcttccgaaatcaaagtttgctttaccaccaatattcataccatgaacattttcaacaccgtgatatgaagaaagatagtcagccatttctgcacttccaattactgttgctcctgttttctttgctagttccacaacatcaccaaaatgatcaaaatgaccgtgcgttaaaacgatatagtctacctgcactgtttcaatattcaaatcacacttagggttatttgaaataaacggatctacgataacctttttgttgttcccttctaaataaatcgttgattgaccatgaaatgataacttcatttgagcatcctcctatcaattactatataaatttagtacccttttgccacttaattataacaaattctcaaattttaaaaattgaaaatctagttaatgtattagctcgattttgaaatctaataataattggcataaaatggaagtaatattatgttgaggagtgtttataaaatgacaaaaatatcaaaaataatagacgaattgaacaatcaacaagctgatgcagcatggattacaacaccgttgaatgtatattattttactggataccgtagcgaaccccatgaaagattatttgcattattgattaagaaagatggtaaacaagtactattttgtccaaaaatggaagtcgaagaagtcaaagcatcacctttcacaggtgaaatcgttggatatttagacactgaaaaccctttttcactttatcctcaaacaatcaataaattactaattgaaagcgagcacttaacagtagcacgccaaaaacaattaatctctggtttcaatgtcaattcattcggagatgttgatttaacaatcaaacaattgagaaatattaaatccgaagatgaaattagcaaaatacgtaaagctgctgagttagcagataagtgtatcgaaataggtgtttcttatttaaaagaaggtgtgactgaatgtgaagtagtcaaccatattgagcaaactatcaaacaatatggcgtcaatgaaatgagttttgatacgatggttttatttggagatcatgccgcatcacctcatggcacaccaggagatcgcagattaaaaagcaatgaatatgtactatttgatttaggtgtaatttatgagcattattgtagcgatatgacacgtactattaaatttggtgaacctagcaaagaagcacaagaaatttataatattgtattagaagcagaaacatctgcaatccaagcaattaaacctggaataccattaaaagatatcgatcatatcgctagaaatattatttcagaaaaaggttatggtgaatatttccctcatcgcttaggtcatggcctaggattacaagaacatgaatatcaagatgtttcaagtactaattctaatttgttagaagctggcatggttattacaatcgaaccaggtatttatgtacctggtgttgcaggtgtaagaattgaagatgacatacttgtcactaatgaaggatatgaagtattaacacattacgaaaaataaggagtgggataaaaatgaaaagcttgttacaagcgcattctcattcagtcaaacactgccaatataacattgtagcgcctaagacataaatttttatccaagtctaaatgcaatatgtaacaaacaagctagaaacacatatgcaggtatgttcatcagtaacatgtaatgaatcaaatcaatatcattcatgttcgatgatttcttcgcattgtttctagctttaatttatcattatttaattttaataaccaaggagatgataacgtcattctttagtacgctgtaatccattcccttttcatcaaattcaaattataattgtaatgcttcttctacagatttatattccatttcaaatgcctctgcaacgcctttattggttacgtgacctttgtaagtatttaaacctaatgataatggttgatttgatttaaatgcttctctataccctttattagctagcatgagcgcataaggtagcgtagcattatttaaagctaacgtcgaagtacgcggtactgcacctggcatatttgcaactgcataatgaaccacaccatgcttaatatatgtaggatcatcatgtgtcgtaattttatcagttgtttcaaaaataccgccttgatcaatagcaatgtcaataataactgacccatttttcatttgtttaatcatgtcttctgttacaagtcttggcgctttagcacctggaattaaaactgcacctattactaaatcactttgtttaacatacaactcaatattcaacggatttgacataattgtatgtacacgtccaccgaataaatcatctaattgttgtaaacgctttggattaacatctaaaatcgtaacatctgcacctagtcctagtgcaattttagctgcatttgttcctgcttgaccaccaccgataatagttactttacccttaggtactcctgggacaccacctagtagaattcccataccaccattaagtttttgtaggaactctgcgccaacttgagctgacattcttcctgctacctcactcattggtgataacaatggtaaagatcggtctggtaactgcacagtctcatatgcaatactaattacttttctatctatcaaagcttgtgttaatttttcttcatttgctaaatgaagataagtgaataatacaagcccttctttaaaatatggatattcagattcaagtggttctttaactttaataaccatatccacatcccaaacttttgcttgttcagcaacaatctcagcacctgcttctttgtaatctacatcttcaaagaatgatcctgaacccgcatttgtttccactaaaacagtatgcccactttctactaaagcgtgcacaccacttggtgataaaccaacacgattttcattatttttaatctcccttggtataccaattttcataccatccacctccataatcatcttaacgcgaacattttgaaagcgcaatcaaaaatccacaaaattgtaaaggttattacactgacttttccgaaaattgtggtaaaatataattaagaaagaacaaggaggcacttactatgattacttacaaaaatattttaatcgcagttgacggttcacatgaagcggaatgggcatttaacagagcagttggtgttgctaaacgtaacgatgcgaagttaacaattgtgaatgtaattgattcaagaacgtattcttcttatgaagtttatgatgctcaatttactgaaaaatctaagcattttgcagaagaattattaaatggttataaagaagtagctactaacgctggtgttaaagatgtagaaacgcgtctagagtttggctctcctaaatctatcattcctaaaaagcttgcacatgaaattaatgcagacttgattatgagtggtacatcaggcttaaatgccgtggaaagatttattgttggttctgtatcagaatctatcgttcgtcatgcgccatgtgacgtgttagttgttcgtactgaagagttaccagcagacttccaaccacaagttgcaacaactcaattacgtgaaaaatatcaaaattaaatatagatgatcattagataactacttgatcattatgaaccaagtgcaactttctgcacttggttttttattgtttataaataaaactcacttaataatgttttcataatcttcttcgactacttaattctttaagatattcgtgaaaagagacattacactagttaattttcaaacaatacaaaaagcgtctacctcctacatataattgtagcggagatagacgcttaatatttatttaaaaattattttaaaccaccgaatgtcataacatcacgggcaatcatactttcttcatctgttggaataacgacaactttaactggtgaatgaggatagttaataaatccttctttaccacgtagtaagttttcatttttcttaggatcccagtaaacacccataaattctaagccttcaagaactttcgcacgaatttctactgagttttcaccgatacctgctgtaaatacgataacatcaacaccatgcattctcgcagcatatgatccaatatatttgtgaattttagaagcaaatacatctaaagccatttgtgaacgtgctttacctgattcagcttcttctgataagtcacgtaaatcactagatgtacctgataatcctaataaacctgattctttgtttaagatttccaatacttgttcagcagttttacctgttttttccataataaatggaattaaagcagggtcaatattaccagaacgagtacccattgttacaccagcaagtggtgtgaagcccattgatgtatcaatagatttaccgccatcgatagctgcaattgatgctccattaccaatgtgacatgaaataatacgtaaatcttcaattggcttatctaacatttctgccgctctttgtgatacaaatttatggcttgtaccatggaaaccatacttacgaatgccataatctttataataatgatatggcaagctatatagatatgctttttcaggcattgtttgatggaatgctgtatcaaaaattgccacatgagggatatttggtaataatttacggaaagcacgaatacccatcaagttagctgggttgtgaagcggtgctaattcgcttaattcttcaatttccttttcaacctcatcagtaatagctactgattcagggaatttttcaccaccatgtacaacacggtgacctgttccatcgatatcgttaatatcattaataatattgtgcgctttaaaagcatccaacatgatatcaactgcctcaacgtgatccttgatatcttgtactgttttaactttttccccgttgacttcaattgtaaaaattgaatccttcaatccgattctttctactaaaccttttgttactaattcctcttcaggcattctaattaattgaaattttaatgatgaactaccagcattgatagccaagattaattttgacataagtaatgatcctccatcgtttgctttttatactatttcatttttcattttatcattcatacagttttatgactatactattacagattattttttaggacgatttgtgtccatccactgatttaactctgtcataaatccttgaaattgtgaaggaattttgaaatcaggaatatttgccaataatacttcaactggctttgtttcacccgattttttcttttgtaaaattaatatagattttcgcgctttttcatttttaaataaagttggtggtaaatttaaaaatgcttgcatctctgtctctgttgcaatatatttttcaagctgttttacatgttcacctgtaaaaatattacttggtaccactagaaaggcatatccagcatcttttaatgcatttattgcttgttctattaataaataatgtgaataactatgtccttcttcaaaacctagcttaaactccttacttctttcatcaattggataatagcctactggaaaatcaccaataacgatatctgcttcttctaatggtagtggcatgatggcatcttgaggatacacatcgaaaggaatttctaagaagtttgctaaatgtacactaacacgtgataaaactggatcaacttcaattaaatgatgcataaccgcaatttcaggtaacacttcttttacagtagcacttaaatgaccggcaccacttgcaatatcaacaatatgtaattcttcttggttgttcataaaacgctcaactaaaaatcctagtatcaatccaattgaatctggtgtaatttgatgatttgcttgtatcttttcttcctgcattaaacttaaatatgcaaattggaatgctttacgtcgatcttgtaacgtcgattgttctaacaatcctctttcattggtatatacttgttccattgctagcccaagattttcaataaaactttggccattttcattatttaatgttttagctttttcatctaatgtatgaaacaagcgttccataattgtttgttgttctgccatattcgtccctctccaataaaaagtgcccataggtcttagcaatcatagaaaacaattctattttaatgctgttgacaacgatggacacgatgtatacattttaagatttatctctttaatgattaaatatttttgtatgcagctaaagcagcatcaaaatctgggaaatcagtaccttcactaacgatttctttataaacaactttattatctgcatctaatacaaatactgcacgagctaataagcgaagttcttccataacaacgccatagttttcaccaaatgataagtcacggtggtcacttaatgtaatgacattgtctaaacctgctgaagcgcaccatcttttttgtgcgaatggtaagtctgctgaaattgtaagcacaatcccctcttctttagaagcatcagagttgaatttgcgagtctgctgatcacaaacacctgtatcaattgatggtaccacactaattaatttctttttaccagcataatctgctaatgttacttgatttaagtcattatctaacactgtaaaatcaggtgcaaaatcaccttcattaatttgttgaccttttaagtggattggtccacctttgaatgttatttcagtcatatacttgacctcctgcattttaaaattctaactacatcatacgacaatttatggtttgattacaattttcatgctttaatcaaaagcaaatttaattttatacaaattgttgaatataatcaaaagcattttttaaaattaaaatagcagtaataataataaataatacttttacataaccaacaccttgtttaatagcaaaatgagccccagcatatgacccagcaatcatacttatagccataattaaacctattacataatctacttgtcctaataccataaataatacaagcgcacctatattagaagcaaagttcaaaactttagcatttcctgctgcacttaaaaaatcaaaaccaaagactaacaatacaaaaagcataaatgaacctgttcccccacctacaaatccatcataaaagccgattaatataaaaagtgctgcaaatattatggctttcttaaatgtaaattgagtaaacgtgcgtgtattgccccaatcttttttaagtaatgtgaatataaacaccgacgaaagtgcaatgatgattaaaggtttcaatatttgtgacggaaccatcgttgcaatatatgcgccacatgcagatgccaaaaatacaaaaccaaataatttggcaacaacatataagtccactttaccggaccttataaactttatcgtactagttaaagaaccaaacgaacttgccaatttatttgtacctaaagccacagatggtggtagaccgattgctaataatgctggcgtagaaattaaaccgccaccccctacaaccgaatctataaacgccgcgataaaaccaaataaaattatgattataatcatcgttaagttcaaatccatagtttaacatccccttatgtttaaatttactctaggattttatttataaaaagtcgtttattaattggtttgtttgctgttctttaatagttttataatcactagttatttcaagtgtttcaatattttcaacagcacgattaatcatctcttcaaaatcaaagacactttcatattggactaccttatcaaagtttggttcggttactggatttttaggggtgaaaattgtacaacaatcttcaaatggttgaatagatgtttcaaatgtaccaatttctttcgatttaataataatttcttctttatcgtaagttaataaaggacgtaatacaggagtagaagttacattattaattgcatacatgctatgaagtgtttgactggctacctgccctaggttttcaccatttacaatagctaaagcccctatttgatgtactaatttatcagcaacacgcatcatcatacgtctcgttgaagtcattgtatatcttggatgtacaactttatttacctgtttttgcaattctgtaaatggtacaatatgcaatttaattggtccaacacgttcagctaaaatacgtgtcaattcaataactttttcttttgcttgatcacttgtaaatggtggactatggaaatgaatcgcttcaattgttacgccacgtctcatcacttccatcccagcaactggtgagtctataccgcctgaaagcattagtaacgtcttaccaccagtaccaactggtaatccacctgaacccggaacaacttcttcatacatataaattgcatctaatctaacttccactcgaatttcatgatctggacgtttgacattcactgaaatattgtcgaagtgcttcaatactgcaccacccaattcacgctgtaattcatacgtatccattgggaaatttttatcggcacgcttcacatcaattttaaatgtgctgttttcttcaaattgctgcgcaaatttaattgccgctgcacttattgcctctattgttttttctacttttaatactggactaatagatttaataccgaaaatttttgataatcgatatgttatttcatttatatctgcatggtcttcaagttcaatatacatacgatctcgtttgcctttaacgacaaacccatcaagtccttttaatgacttatttacattatttcttaattgatttacaaatttctttctatttgaaccctttaatgttaactccccgtatctaacaagcaagtgatcatacttcattattttagcaactccttaatttcctcataaatgatgataaatatttctttaaacctcgctatatcttctttagttgtagtagccccaaatgataatcttatactaccttcaatagatttgtctgataatcccattgcagccaatacttcatttaatttattacgtttagatgaacaagcacttgtcgtagatatcataatgtcatattttgaaaaagcattaactaatacttcaccttttacgccaggaaaactaatatttaaaacgaatggtgaacctgaagttgaagaattaatataaactccatgatatttatttaaaaattgacggacgtcattatttaactcagtaacaaatgcattcaatgcttcaaagttttcattagctatcttcatcgctttaaccattgcaatatcatttggcaaattaactgttccacttctaacaccatattcttgaccaccaccatggacagttggttcaacattttgaatgtgatttacaagtaagacgccttgtccttttaaaccattaaacttgtgtccacttaaactaatactatctatgttattgagatccattgaaattttgccgaatgcttgaaccgcatctacatgaaaatgtgccttaggataattttttataactttagccatttgtggaataggctgtatttgtccagttacattatttacatacatacatgttactaaaccgactttgtctgacattaattctttgaagtgttctaagttaatactgccatctttctttacatcaacatatttaactttaaatccttcgtgtgcttccaaatatcttacaacctctaatacggacggatgctctaacacggatgtaattatttccttcgctgtatcaaatttacgataggcaataccttttaaagcaagattattggattcagttgcaccactagtgaatacaacatcataatttgtttttgaattaatcattgcattaatttgggtttttgcttgttgtagtaattgatttgcctgcaaaccagctttatgcggactattcggattataatacattgattgatttacttttaaataagtatctaacacttcttcaaatgctttcgtcgttgccgcattatctagatatatcaaaataaacacttctctttcattaatcatcaatcgttaaaattgttttactcaagcattatactattatccgacaaaaaataaaggttatagcgcaaaataatcttatttctacttattaaataagaattagactatttcactctatttaaacagctgtgtgattatgcttttttcactacttatattaattaaaacaacacatttgattacgtttatctttaaacaattgctatttatatttattgtccctttcatttatccatataaaaaagaagctagacaacgtatcgttggctaacttcaattattaaactcatcagtccaatttgacagagtgctcatattatttaagtataactacatactagtttctattgcttaataacttcttcttcaatatgtttagtaacacctggctcaacactttcaagagcttgctctgcaatttcaatcgcacgcttatagcgattatttttaaataatcgttcagcttcatttaagctcttatcaacattgctatagtccttacgatatctatttccatattgaattaatttctctgcataaacagcattaacaagaacatcatttgcttcatcttcaaatgtattcatttgaatcacaattttagacactttatcttttaactgtttaacgtgtattggacgttcactaaattgttcgttaacatcacgaacttcatgatcaatttcatttttcatgatgataaacctttcaggaacgcttgttaagttagaagcaagtaatcgacgatacacttcttctttcttcgattgtactcgtagcagattgtcttctgcttctgcttcatcttcacgcaattgaatcagatgattttgtagcttttcttgtttgtcattaataactgtgacatgatcttctaaatattgtaaattatcctgaacctcgctatatcgcacagcagatttagacatttcttttaaaatatcatcatatacagaaattaaactttgaatttcattttcaaattgacgaacactctgagcatcagattcatttatatagtagttttcacgtacatattcaatttctgtttgcaatgtataattcatgtctttagctttgaataagttatccgtaatgatatcttttgtttcttcgacatcatttttagctttaacttcatgttcaattaaatcatacatgtcatctaacttatcattgatattagctagtttatcattagcttcttctaattctaagcggctaattaatggttcaacgaaactaagctctgtttttaagctttgtaatgtactgtctactttcacgtgatccagatcatacccttcaactttaagatcacggcaaccatattttaaatcttggaattgaccaggtaattctttttgagtttctctaattaattctggtatttcttccatataagatcttagctgtttcatttgttcattcaaggcagctatatggttgtgcgcttgtacataattaccatcagcttttagtacttcatattgctctaaccttggctcaaatttttcaatttcagtttcaagtagacttgctgcctcaccaaattgatgacgatttgctaaaacatcacgtttcatttcacgataatcaaccttacatttgtcatataattcatcattatctttgtataacgcaataatttcatttacatcttctaattgttgctgatagctttgttcgtaactatccatcaactcatttgcatcatcaatttcactttgagatgcgttgaaactaaatttatctaataaagcctcagcattatggattttttcttccacaggagctagatacttatttgtactttctacggtgtcctttttcattgcatcgtatttcgtttttgtttcaccttttaaattcaacttaaataattgtgcaaggttttgatcaaaaggtaacgtctcaatttcatttttacgttcgattgctttttcaataatttgtcgtttatttgaacgtaaatagaataatacacctacagcaatcaatataatcacaattattgccaaaatgatatataacaccatatgcttctcctcctaatttatcattactattataacgtaattttgcttaaggataaattataaaatgaatttattgccataatattttcgaaattctatactattataaaatctatgaaaataagaggttttaaatatgacaacaattaacccaacaaactacacattattaaagaaacaagcagcaagccttattgaagatgaacatcacatgattgctattttaagtaacatgtctgccttattaaatgataatctagatcaaattaattgggttggcttttacttattggaacaaaatgaacttatacttggacctttccaaggacaccccgcttgtgtccacattccaatcggaaaaggtgtatgtggtacagccgtttcagaacgtcgtacacaaattgtagctgatgttcatcaattcgaaggacatatcgcttgtgatgctaatagtaagtctgagattgtcgttccaattttcaaagatgataaaattatcggcgtcttagatatcgatgcccctataacggatcgatttgatgacaatgacaaagaacatcttgaagcaattgttaaaattattgaaaagcaactcgcataaaaggacatcagcattttcaataaagtgttgacagttagcaggaaaatgttacaataatctttgtgtgaattaacgaaagtagcagttgtatattattgagcgctatgttgttcccaatgcggacgtgtcacgtaactgtcgctataaggtgaagacacataaaacaatatatcttagtaagcatgcaacactcttttttgtttattcataacaacaaaaaagaattaaaggaggagtcttattatggctcgattcagaggttcaaactggaaaaaatctcgtcgtttaggtatctctttaagcggtactggtaaagaattagaaaaacgtccttacgcaccaggacaacatggtccaaaccaacgtaaaaaattatcagaatatggtttacaattacgtgaaaaacaaaaattacgttacttatatggaatgactgaaagacaattccgtaacacatttgacatcgctggtaaaaaattcggtgtacacggtgaaaacttcatgatcttattagcaagtcgtttagacgctgttgtttattcattaggtttagctcgtactcgtcgtcaagcacgtcaattagttaaccacggtcatatcttagtagatggtaaacgtgttgatattccatcttattctgttaaacctggtcaaacaatttcagttcgtgaaaaatctcaaaaattaaacatcatcgttgaatcagttgaaatcaacaatttcgtacctgagtacttaaactttgatgctgacagcttaactggtactttcgtacgtttaccagaacgtagcgaattacctgctgaaattaacgaacaattaatcgttgagtactactcaagataatacgttcaatacaaacacccacaattgtgggtgttttttttattaatttaaaaatgatagattcaaaattatatggagctaccctattttacaatcaacttagaatttacaagtcttatttgtttaattatctttagtatttcatcattagtttttaaaattatcaattgcgatatacgaatcctcatccctctatcaaattaccattcatcgtctcacttaataaataatttcggattatctgtaattaatccatctacacccatttgtcttaatttttctccagttttcaatttattaactgtgtatggcataacctgtaattgatgatgatgtgctttatcaacaaattttctggtcactaatgcataattaggattaacataactagcaatttgagcaattcttgaaaagtttggctttttataccaataattacgtttactacaaagcacacctaattcatatatactgcccaatgtgtttaacttttcgatgcattcgatatcaaaagattgtataactacttgtgtcgcatcgactttcttttcttccaaaaatgccagcaatttacattctatttctggatataaattcggacttttcaattcaatcaatagctttttatcatactttaagcataatgaaagtacttcatctaacgtgggtattcgttctcccttaaaagcaacatctttataactaccaaaatcaaatgattttaattgcgataatgtgtaatcagcaatacgccccttaccatccgatgttctatcaattgtttcatcatgtatcacaacaaaatgttggtctttggtcaaatgaacatctatttctaacatagcaacattgagccccattacctctcgataaccgaccattgtattttcaggaaaatcactcggcaatccacggtgcgaaacaatttgtaattcatctttcagtttattcagagtcattgataagtcacctttctgttaaactttgataaactattctaaaattaaactatcacaattatattggaggttaaagcaattgcatcaacatgactttaaagtccaaacttcttggcaaggtggtcgtaacaatgtcggaaacgttcaaggcgacatactttcagagaatatttctatacctgcttctttaggtggtgttggtataggaacaaatcccgatgaaatgttagtatcagccgcttcatcatgttatatcatctcattagcagctactcttgaacgtgcaaagttcacagatatttcaattgaacaacaatcgattggaacagcttgtttaaataacggaaaattcagtatgtcaaaaattgtgcaccatcctcaaattcaaattccaagtgatcaaatagcacaattagaaaagcgattaccaaaattgataacaattgcagataataattgcatgatttcaaatgctgtaagaaataatgtggacataaaaatctatcccatcattcaggccaaataaaatcgttaagtgataacgtttgttcgacaatatagcgttatcacttttttaggcttttaaattttcagaaaatttgctaaaatagtgaaatcttatttataggaggcatataaatgtattatcatcaaccgttgttattaacacctggcccaacccctgtacctgatgccattatgagagaaattcaagcacctatggttggtcatcgttctaaagattttgaagacatcgcacaacaagcatttcaaggtctaaagccaatatttgggagtcaaaatgatgtacttattttaacatctagcggtacaagcgtcttggaggctagtatgttgaacattgtaaaccctgaagatcacttcgttgtcattgtttcaggtgcctttggtaaccgatttaaacaaattgcacaaacttattacaaaaatgtgcatatttatgacgtaacatggggagaagctgtagatgtcaaagatttcatcaatttcctttcaactttaaatgttgaagttaaagcagtatttagtcaatattgcgaaacatctacgacagtgctacaccctattcacgagttaggaaatgccattaatcaatttaatagtaatatttattttgtagttgacggcgtaagttgcattggtgctgttgatgttgacattaacaaagataaaattgatgtacttgtttctggtagtcaaaaagcaattatgttacctccaggattagcttttgtagcttatagccaccgtgcaaaagaacatttcaaagaagtaactacgccaaaattttatctagacttaaataaatacatttcgtcacaagctgacaattctacaccgttcacaccaaatgtgtctttatttagaggtgtaaatgcatacgttgaaaccgtaaaagcagaaggtttcaatcacgtaatagcacgacactatgcaattagaaatgcattaagaagcgccttaaaagcattagatttaactttattagtcaatgataaagatgcatctccaacggttacagcattcaaacctaatacaaatgatgaagtgaaaataatcaaagatgaacttaaaaatcgctttaaaataacaattgctggtggtcaaggccatcttaaaggtcaaattttaagaattggtcatatggggaaaattagtcctttcgatattttatcggtagtatctgctttagaaattattttaactgaacaccgtaaagttaactatatcggtaaaggtatatcaaaatatatggaggttattcatgaagcaatttaatgtactcgttgcagatcccatatcaaaagatggtatcaaagcattattagatcacgaacaattcaatgtagatattcaaactggcttgtccgaagaagcattaatcaaaattataccttcataccatgctttaatcgttcgtagtcaaactacggttactgaaaatatcataaatgctgctgattctttaaaagtaatcgcacgcgccggtgttggtgtagataatattaatattgatgctgcaacattaaaaggtattttagttattaatgccccagatggtaatacgatttcagctactgaacatacactggcaatgttattatcaatggcacgaaatattccgcaagcacaccaatcacttacaaataaagaatggaatcgaaatgcatttaaaggtactgagctttatcataaaacattaggtgtcattggtgctggtagaattggtttaggtgttgctaaacgtgcgcaaagtttcggaatgaaaatactagcttttgacccttacttaacggatgaaaaagcaaaatctttaagcattacgaaggcaacagttgatgagattgcccaacattctgatttcgttacattacatacaccactaacacctaaaacaaaaggcttaattaatgctgtcttttttgccaaagcaaaacctagtttgcaaataatcaatgtggcacgtggtggtattattgatgaaaaggcgctaataaaagcattagacgaaggacaaattagtcgggcagctatcgatgtgtttgaacatgaacctgcaactgactcgcctcttgttgcacatgataaaattattgttacacctcatttgggtgcttcaacagtcgaagctcaagaaaaagtggcaatttctgtttcaaatgaaatcatcgaaattttaattgatggtactgtaacgcatgcagtgaatgcacctaaaatggacttaagcaatatagatgatactgtaaaatcattcatcaatttaagccaaacagttggtgaattagctattcaattaatgtacaatgcaccaagctctattaaaattacgtacggtggcgacttagcctctattgatagtagtttattaacacgtacaattattactcatattttaaaagatgatcttggtcctgaagtcaatattatcaatgctctaatgttgttaaatcaacaacaagtgacattaaatattgaaaataataaagcagagacaggttttagtaactacttagaggtagaactatcaaacgatagcgattccgttaaagttggcgcttctgtctttacaggtttcggtccaagaattgttagaattaataatttttctgtagacttaaagccaaatcaatatcaaattgtgtcatatcataatgatactccaggtatggtaggaaaaactggcgcattgttaggtaaatacaatatcaacattgcatctatgactttaggtagaactgaagcgggcggagatgcgctaatgattttatccgttgatcaacctgtttcaaacaatataattgatgaacttaaacaagttggtgaatacaatcaaattttcacaactgaattgacggtacagtcataaacaatttatgtaaattcaaaatgccaagaagacattggattacttccattgcttcttggcattttttcattattaatttcattgtaactcaatatgaaacctttggttcaatcattcactacaagttatgctgtcaaacaacaatcaaattacaaattatctagtacacctctaagttcacctaaatgattaataacatagtcggcatgatgcgcttctaactcacctgcagcatccttaccttttaaacctgttaatgttccaataaacgttgcacctattttttgagcacttaataagtcagctaacgaatcgcctactataaatacgtcatctttatttacaatgttatcttgcttattgatataagattcatatttatcgcgattattaccatataaagctgcgatataactaaaaggattcggctttcctaatggtcgtgcttgcggatacatattctctgcttctaaaacatcacttgctgttgcaataaaatcagcttcaaaatatggtaacaatcctaaattttcaaatggcacaacagtctcagtataaggacgacctgttgcaatacctaattcgaaaccagcaccttttaaatcattcagaagtaccttaacttcatctactggtctcaaaataatttcttgataaatataacctgtcttaaaagtagttcgtgctattttcttttcaacatcttcatacaacttcgatcctaaataccattcttgataaacttcttgcgctaacgtccataatgcacccttcaaactaaataaagtagcatccgaaacatgtaactctgttgttgcaaactcttccaaagcagcataaatattatttttaccaacttttacattatccaaaaattgtaaaggtagttgttcatttaaattaaaacagtctgctaagtttgtgcttatattttgcaacttcaattcgacaggctcatcttgatacatgaatgcctcaatttcatcatgtgataactttttcaaaatatcaattaaatgaatactaaaaacgataaataacatatcccaatttgaattcagccctagcgattttaatttgtttaaaatcttatctttttgaaaaattcgattcctaatgtcttgtatatcgttatcagtcaaagtttcccaatctatatgtgaatgaagacctaaataacacttatccattaataattcatataccgttaatgcagagacatcgaaacaacgttcttcacttaaaaaaacgccatcaacatcaaataaaattttcttcacaatccccactccatttctgaaaattcagatataaatcattctactatttgactaaaaaaagcgcaaaccctattgaagttagatttgcgctttagctgtttaaattttataaatgtttttcaatttcatcagcaacctgctgtacgtgtgtaccgacaataacttgagttgaatgtttgccattaacagtaacaccaactgcaccggcgtttttaatcttctgtttatcaataatagatgtgtcttttaactctagacgcaaccttgttgcacaattggttaaattaacaatattctcttgaccgcctaaaccttctaatatttgtatagcatgttgatgatatttactttgtttaatatcattttcaccaggagcaatattatcttttacaactgttgggtcaactaattcattttcacctctaccaatcgtattcaagttaaatacttggattactacacggaaaatcacatagtataagatgaaaaatacaacaccttgaacaagcaacatcaatggatgatttgatactggattaattagtgataacacataatctatcaaacctgcactaaatgaaaatccagctgtccaatggaatgtagctgcgataaataaagataatcctgttaataacgcatgaacaacatataagattggcacaacaaacataaatgcaaactcaatcggctctgtaacaccaacgaaaaatgctgcaactgaactcgctaggaaccaaccgtaaacttgttttttctgagtagttttagctgtatgatacattgctaacgcagccgctggaataccgaacatcatgattgggaagaatcccgcttgatagcgtcctgtaataccttttatagcatctttgccactttggaatttaccaatatcattaataccaatcgtatcaaaccagaacacactattcagtgcatgatgtaatcctgtaggaattaataatctattggcaacaccatatatgaaagctccaaacgatcctaaaccgactatagattcaccaaattttacaatccatgaataaagtagtggccataagaataacaatatgacaactaaaaatgtacagtaaaatgcagtcataattggaactagacgtttaccactaaaaaatgataatgctaatggtaattctgtttcactaaacttattgtatgcataagctgctattaaacctattacaataccaacaaagacattgccattattcatcttttcaaaagctgaatttatttccgaagctttcattcctaataaaggcgctaatttcattggtgataatacaactgtaactaaaaaatatcctaacgtagctgcaagcgcgactgcaccatcatttttctttgccattcctatagctacaccaattgcaaataaaatacctaattgctctaaaatcgtagtacctaccgtagtaaagaacattgcgattttcggcgtcgcatgaagtgcatttaacgtattaccaattccggcaataattgctgcagccggtaaaatggcaactggtaacattaacgaacgccctaaattttggaaaaatttatacattgaatgtcatccttcttaaaataatgtagaaatataaagattactaatgtaactagaataactacttcgatactccgttatagtcacctaggcttactaaccagctatatttctacctcaagttattttataaactttttacaatttcatgcaattcttgttgtaactttgctgttcgtgtttcaatctcttttgtaatataatcgatacgctcgtttcgttttaaatctttaggtaaatcgttaatatcgattggtttgccaatatttatgtatgcttgtcctgttaaaagaccgtgaatcttagtaggaccaacataagcaacaggtaatattggtgacttacttaacattgcaattgttgaagcaccacgtttcaaaggtgcaccttcttgcgatgtgcgagaacctgttgggaagataccaactgtcttattatctttcaacaaattgattgggcgttttaaagtactaggtcctggattttcacgatctacaggaaatgcatttaaagacgttaaaaatttaccaatccatttatttttgaataattcttttttagccatataatgaatttgattaggatataatgccatacctagcataatgacttcgttataactttcatgcgtacaagttacgacatatttactatccttaggaatattatctttaccgattacgtataatgattttgacattttaactaaaatgaaattcaaaatcttactaatcactgaatacattgtgccacctacttaacttatttgtttataacaactagattttatcactatatttttactagaacaagatagtctgaaaatacatctaaagttgtatagtgtattactagcaataattataaaaaaaagacataattaaagcatatataaatcatataatggaggttaagtatgtcagattttaatcatacagatcattctacaacaaaccatagccaaacacctagatacagaagacctaaatttccatggtttaaaacagtcatcgttgcattgattgctggaattattggtgcacttctagtacttggtataggcaaagtattaaatagtacaattttaaataaagatggttcaactgttcagacaacaaataataaaggtggcaatcaattagacggtcaaagcaagaaattcggtaccgttcatgaaatgataaaatctgtctcccctacaattgttggagttattaacatgcaaaaagcatcaagtgtagacgacttattaaaaggcaaatcatctaaaccatctgaagctggagtaggttcaggtgttatctatcaaataaacaacaattcagcttatatcgttacaaacaatcatgttattgatggcgcaaatgaaattagagtccaattacataataaaaaacaagttaaagcgaaattagttggtaaagatgcagtaactgatattgctgtacttaaaattgaaaatacaaaaggtattaaagcgattcaatttgccaactcttcaaaagtacaaactggcgatagcgtattcgcaatgggtaacccattaggattacaatttgctaactctgtaacatctggtatcatttcagcaagcgaacgtacgattgacgctgagacaactggtggcaatacaaaagttagcgttcttcaaacagatgctgctattaacccaggtaactcaggtggcgcattagtagatattaatggtaatttagttggtattaactcaatgaaaattgctgcgacacaagttgaaggtatcgggtttgctattccaagtaatgaagttaaagtaacaattgaacaacttgtaaaacatggtaaaattgaccgcccttcgattggtattggtttaattaatttgaaagatattcctgaagaagagcgcgagcaacttcatactgatagagaagacggtatttatgtcgccaaagctgatagtgatattgatcttaaaaaaggtgatattattacagaaattgatggcaagaaaattaaagatgatgttgatttaagaagctatttatatgaaaataaaaaacctggtgaatcagtcactgttaccgttatccgtgatggtaaaacaaaagaagttaaagtgaaattaaaacaacaaaaagaacaaccaaaacgtcaaagccgatcagaacgtcaatcacctggccaaggcgatagagatttctttagataatttacagacagaaaagtacattaagagcctactcattacattcttaggaatgaatatgagtaggctctaatttatttagctatgcaattatatttattgatagttaaccatgaagtattttttcttaccgcgacgaataatcgtaaattcgccatcaattttatcttctggtgctaaagcataattaacatcttgttgtctctcaccattaatataaatcgcaccattgttaacatcttcacgtgcttgtcgtttagaaggagaaatgcctgtttcaataaggacttcaacgatatttgttgtgtcatttgataatgtcacttgaggcacatctttaaatccatcttttaattctttcgctgataatgattttaaatcaccactaaataatgcttgtgaaatacggattgcatcatttaatgcatcttcaccatgaataaatttagttacttcttcagctaatgttttttgagcttcacgtaaatgcggtgcttcatttttagattgttctaagcgatcaatttcttcttttcctaagaaagtaaagtattttaagaatttaattacatcttcgtctgattgattaatccagaattgataaaattcataaggacttgttttttcagcatctaaccaaacagcacctgactcagacttaccaaatttcttaccatctgatttagttacaagcggaatagttaaaccgtatgcgtctgtttgaccatacatacgacgcattaattcaataccacttgtgatattaccccattgatctgatccacctacttgaatcttacaattcaattctctattcaaatgaccgaaatcaatagcttgtaaaatcgtgtatgtgaattctgtatatgaaataccatgttctaaacgactttggattgaatctttacctaacatgtaattaacgccgacgtgtttaccatagtcacgtaaaaaactaattaatgagatttgtcctaaccagtctctattattaacaagcactgcaccatggtctgttccaaattcaaaaatattgtgcatttgcttactaataccttcgatatttttatctacttgttcttctgtttgtagcacacgttcttctgatttacctgatggatcaccaatcatacctgtaccaccgccaattaaaacgataggacgatgtccatgttcttgaaaacgtcttaatgttaagaatggtagtaagtgaccaatatgtaaactatctgccgttggatcggcaccgcagtataacgtcacttgttctttatttaataaatcttcaataccttgttcatcagtttgttgataaataagacctctccattttaaatcttcaattaatacattcgtcattattatttcctcctatttataattatttattgaatacttgttaaaatactttaaagttttttgaacgtaaaaaaaacccttacaacaaatatgtaagggcgcgattgcacgttaccaccaaacttaaacataatcataagataatgttcactctattaatgatacgttcattaataaacgtaggacatgttagttataaaggtgtattcatattattaaaaacactagttcacagcgaccactagctctctgatgatttcaaataatattacttgtccttttatcctattctttatgcattttccctaattataattaacgttaaaataaaagtcaaattgcttaaatatggtatactatacgtaatttaggaggttaaagatgacgaatcaagacaacaatcatcaattgaatcatcgtatatatcattttgaaaagatatataaagctatcaaacatgtcattgtttttatatttatgattttcattgccatcgttgctatcgctgtgattgcgatgtctttatattttcatcatttaactaaaacgtccgactcattatcagatgatgctttaataaaaaaagttcgacaaatacctggcgatgaattattagatcataataacaaaaatttattatatgagtataaccattctcaaaactcactcattataggccctaaaacatcaagtccaaatgtcattaaagcattaacgtcatctgaagacactttattttataaacatgatggcatcttaccaaaggcgattttaagagcaatgatacaagatatttttaatactgatcaaagttcaggtggtagcacaattacacaacaacttgttaaaaatcaagttcttaccaacgaaaaaacatatagtagaaaagcaaatgaacttcgcctagcaattagattagaacacctactctcaaaagatgaaattatatatacatatttaaatatagttcccttcggtagagattataatggcgctaatatttccggaattgcatccgcttcatatagtctatttggtattccaccaaaagatttatcaattgcacaatctgcataccttatcggtttgttgcaaagcccatatggctatacaccctacgaaaaagatggaacgttaaaatcggataaagatttgaaatatagtattcaaagacaacattatgtattaaagcgtatgttaatcgaagatcaaatcactgaaaaagaatacaacgacgcattaaaatatgatattaaatcacatttgttaaatcgaaaaaagcgttaattgatgctcactttttaaagtaaccacaacaatgaatccaaatattaaaaacagcagtaagattattttcaattagaaaatttctcactgctgttctttttatttactctaaaggaaagccattaaaccaatcaatagtttataaattaattgctttcacattgtctacaaagttaatcatacatatgctatatttagttaattatttagattcttttctgaatttaggaatgaataaagctaacatacctaataacgcatataagccccaccatgattggcttgaagttgtttctccagtttttggtagcattttagattgactaagtttgttttctttcgatggtgtgccggctttttcttttgttttcactgttttatctacagttttatgaatatcactcggcagatgttcagttgtttttttgtcagtaactttgtctgtattattataattttgtttcactacgtcaagctttgctgcttttccagtatgattatttttatcggcaatatgattcagctgtatgactttgtctttatttttattagagtctttatcagtatcgacattagatgacataccaacgctattatcggcatctttatccacatttctatcagtatctttggcaatttgagtatccatttcttttaaatcatatttatcgaagtgattattatccgacatatcggataaatgatcaacatcatgttgcacatctttatcaatattattatcagcatctttaaccacgtcagactctggttctatcacatctgctttatcagacgcatctttaggatttgttgcagtgctgctattttcagctacatctgtatcagcaaccttaccttcttgtcctgtttgtacatttagcggttcactcgtgttattttgtgatgtatcatcatcttttgtattgatatcctgatttataattctgacatgatattgaccttcataaccaatgtttgccacaacgactttaacaatcgcattgtaaactgctttgtcaggtatatatgggaaaatcagcgttctagaattatttttaggatctttagaaacagtagtgacacgtttaccttctacaattaaatctttccagtaactgtcatcctttgttttcatcactacatatttttgaccatttaaagttgctgtatagaatggatgttcaacaaagccgtccataactgactcactattttcttcactttcaaaaacaacaaaatgcgcttcttgtaaatctgttaattgatcatttgtaggtgtaacattttcaaattccgtcactgctgatttaacttgatcagctaactctactctagtttgatctaatttctttttatattccgccttatatttttctggcaatttctcttgtaatttttctaattcataaacttgtctttctaacgttttagctttgtgatacggagctaataatttttgtaaattgtatgtttcttcatccacatagtcgtctgggttattagtaataggctgtgcaaagaccattagcgtataatcatagtcttcatggatgttctcaccatattcaatagatgacacaattttaacttctctcgtaccattagatactgggaaacgaatataggcataatctttatcagaatcatatgatactaattcgactggtaactttttgtcaccttcataaacttcaaatttcttccatgttgaagctgtctttaaacctaattcaattattggtcctgtttttgtaaaaatgacagttgctggttcaacagtactagcataatgatagaactgtctttcacctttatcatttttcatttgaaaatcaattggtcgccaattatcagctgtatgttctttatcgatgatagccgggtttttaattgcatcttgtagtgattcatctgctggtggatactgttgattaacatccgactgattacttgactcattcgttttatcgttagtattaccattagaatttgtttcatgagctggttggcttgacgcttgatctgcattcgttgacgattttggttgtgcaggttgactcatattggtcgttgcctgcggttgattattagcattgttgatcgttgatatattttgattagatgtattcgtgtttgtttgattacttgcgactgaacttgattgatcattcgttactactgcatcatttgtatctgattttacaagtgaaggatcgttataaataggtttagcaaatactaatttagtataatcataatttgtttcttctccatcatcaatttgagtcgaagaaacaattttcaattcttgtgtgccatctgaaactgggaatcgaatataggcatggtcttctggtacaggactatatgatacaagtctcactggcaatttttgattgttttcatagacttcaaacttcttccatgttgaagcagtattgatgtctaattcaacttctgctttctttttagtgtaatacacatctgctggatctttgatgctgaaaaagtgatagtactgcgtttcattgtttttatctaataactggaaattgacttgttctcttggacctatatcatgttctttattttctaatgcaggatctttaattgcatctttaagtgattcatccgctgcaggatagtttttcgcagtgtttgctggttgcgtagcaggttgtgtttgatttgtatccttaggtggctgagttgtagttgcattattattttgattttccgagattttatctgaagtatttgtattttctgctgcttgtgcttgatgttgagaagtaattaaaaatagtgtactgacaatgaccgatgcaacgcctagagttgattttctaatagaatagaaagaccttaattttgggtgatgtttgttcatgttgttaacaactcctataagattatatttaattgataataattatcaatatcaattattagtgttaattgtagcgcatcccaattaaatattgcaacctattttattaattttttttaatatggaatattcattgcatcgctttcctattcttcaagcccactttttatcttcatatacattaattaaccaccttcaaacattgtcgttagattcgccaaattgaatctatttttagcacagcaaaaaaccgaactgctgaaataatgcatctccaacagtccggtctattaaactatttacttatctttattaaacaattgacatgatttattagaataacccaattgcatgaccatcatcagtaacatccatgtttaatgctgctggttttttaggtaaaccaggcatagtcatgattgcacctgtcaacgctacgataaatcctgcacctgttttcgcttctaattcacgaattgtaatttcaaatcctgatggtgcacctaacaacgtttgatcatctgagaatgaatattgtgttttcgccatacatactgggtaattatcccaaccattttctttaaattgttttaattgtttttgcgctttactgctaaacgttacttttgaaccgccatagatttcagtcacaatcttttcaatcttttgctctaatggtaattctaattcatataaaggtttaaatgaattaggttgatcaatgacttctaatacttcatttgctaagtcaacgccacctttaccacctttttcccaaacttcagttaaggcaattcgtacgttattttctttagcccaagattttacatattctacttctgcatcggtatcatgtataaatgcattaattgcaacaaccggttctacaccgaattttttaatattattaacatgacgctctaaattaacaattcctgcttttactgcttctacattttcttcttttaaattatctttcgctacaccaccatgcatttttaacgcacgaattgtcgcaacaacaacgacagctgccggatcaaatcctgcttcacgcgctttaatgtccatgaatttttcagcgcctaagtctgaaccaaatccagcttccgttacaacgatatcagctaaatcacgtgctgtttcagttgctaaaattgagttacaaccgtgtgcgatattcgcaaatggtccaccatgaactaatgcaggtgtcccttcaattgattgtactaagtttggttttattgcatcttttaaaatcattgcaagtgcaccttccacttttaaatctgcaactgtaactggcttgcgatctctagtgtaaccaatagtaatacgactaattttatcttttaagtctttaatacttctacttaaacataaaatcgccataatttcagacgctactgtaatattaaagccatcttcacgtggtacaccatttgtaggtccacctaacccaacgtttacatgtctaagtgcacgatcattcatatctaatacacgtttccactcaatacgtctttgatcgattcctaattcgttaccttggtgaatatgattatcgataaacgcagacaatgcattatttgcagttgtaatcgcatggaaatctccgttgaaatgtaagttgatatcttccataggtaagacttgcgcataaccaccaccagtcgcaccacctttgataccaaatgttggtcctaaagcaggctctcttaatgcaaccataacgtttttatttaactcatggaatgcatcagctaaaccaactgtaaccgttgatttaccttcaccagctggtgttgggctcatcgcagttactaaaacaactttccctttgttttctcttggcgtaattttattaatgtcgattttagctttgtaatgaccataaggttctaatgcatcctctgaaatacctactgatgcagcaatatccttaattggttgtagtgttgattgattcgcaatatctaaatctgataaatgagtcaacttttttcgcccctttttgtttaatttatgcatttataatatgtaagttgtagctaagaaatttttacttacattcatataataacgaactgttaaaaacttgtcgactaaatcgggttagcgctttcatttttgcaataaattcacttattaaagttttgtattatacaacttttagcgcttgatactattgataactatatttttctattatttaaaataatcatcttccaaagatcatattaaaaataaaaagcaatataaagatatgccattattgttatgtcatcattttcaaatgctttctacgaaatgatatgacacaagttaacagttctttatattgcttatcgtaaagtaaacgattatttaaacattgacatgaaatatgttgtcaccctttattcttcgaaaaaaatcttcaataacattcatgtcattattccattgtacttaaatccccagcatctaaatttaattcccaagcttttaatacacgtctcataattttacctgaccgtgttttaggtaatttatctttaaattcgatttcacgtggtgctgcatgtgccgacaaaccttctttaacaaatatacgaatttcttcttttaattcgtctgttggttcatatccttttctcagtgcaacaaacgccttaattatttcaccgcgaaccggatcaggtttaccaataattcctgcttcggcaactgcttcgtgttcaaccaatttagactcaacctcaaatggtccaactcgttcaccagctgtcataattacatcatcaacacgtccttggaaccagaagtaaccatcttcatctttatatgccgaatcaccagatacataccagtctccaataaaatatgatttatatttttctggattcttccagatacgatacatcattgatggccagcctttttttatagcaaggttgcccattcgatttggtggtaattcattccctgcatcatcgataattgcagcttgaataccaggtaatggtttgcccattgagccaagcttgacgtccatcgttggatagttaacaatcatatgtccacctgtttctgtcatccaccaagtatctaacaccgttaaaccgtatacttttttcgcccattttataacttcaggatttaaaggctcacctactgatagaatcgaacgtaacgatgacaagtcatatttctcaacaatatcgtcaccagcactcattaacattcttaaagctgttggtgccgtataccaaatcgtcactttaaaatcttcaatcatactataccactgttctggcgaaaagcgaccaccagctatacaatttgtagcgccatttaaccatggtgcaaaaataccataagatgttcctgtaacccaacctggatctgctgtacaccaataaacatcatcttcttgtaaatctaatacatattttccagaaatatagtgcactaacattgcttgttgaacatgcaatacacctttaggttgcccagtagaacctgatgtataatgtaaaatcaaaccatcatccgactttaaccattcaatgtcaaattcatcgctagcagtttccatcaaactaatgaagtctatgtaattgtcttctacatcctcatctacgacaacaatttttttcaagtttggtaatttatctacaggtactcgaggtaacaatgccttattagtaattaacactttagcttcactgttctctaatctatccgcaactgccttttccataaatgcttcaaataacggcccaacaattgcaccaatttttaaaacacctaacaacgcaaaatatagttcaggtgtacgcgacataaatataaatactctgtcacctttgtcaacttctgcatgttcagacaaaacattcgctgctttattagataaccgttgcatatctttataagtatacgattcttttctgtgctcatctttgtaatttaacgctattttatcccctaatccttgatctacatggcgatctatgcattcatatgccatgttcatttttccagtttcactccaagaaaatgcttgttctacgtctttccaatcaaaagtattatatgtttcttcataatctttaaggttatgtttaccttgcgctcctttataaacttcgactttcatttgaaactccccctttgttatgtgaaaacgctttctttctcaatattatacataacatttctaattattcaaaatttttacttttatcctttttctagtattaattattgtaaattttctatataatgaatttaatacaatcacgacgtcgattgaggagttgaaaatatgaatcatttaaagacgtatcaatccgaagattattacattcatgacaagcaatttgttattgaaggtcctttaacacacgaagatttgaaagcgcttactttcgatgcgcatttaaccgcatttagagatgctgaagatcagtataaagctttgttagaaattacaacattaccagaaggtagaatttatgttgctcgccaagatcaactcattgtgggttatgtcactttccactatcctgatgaaattgagcgctggtctacaggtaagcttccatatttaatcgaattgggggcaattgaagtcagcatcaattttaggcaattacaacttgcagaaaagctgatacaacttagcctttctacaccagaattcgagaattatatcgttataactacagaatattactggcattgggatttaaaaaattcaaagttagatgtatttgactataaaaaattaatgcagcggttaatggcaactggtggacttgaaatattcgctacagatgatccagaaataacaagtcatccagctaattgtttaatggcaagaattggcaaaaacattacattagaacagcaacaagcgtttgatgatattcgttatatgaatcggtttttcttttaatttttggaatatcggagggattatatgcaacaacattcatcaaaaactgcatatgtttattcagataagttattacaatatcgatttcatgaccaacatcccttcaatcaaatgcgtttaaaattaacaacagagctacttttgaatgcaaatttattgtctccagaacaaatagtacaacctagaattgcaacagatgacgaattaatgttaattcataaatatgattacgtcgaagctattaagcatgcttcacatggcattatcagtgaagatgaggctaagaaatatggattaaatgatgaagagaatggtcaatttaagcatatgcaccgccatagtgccacaattgttggaggcgctttaactttagcagatcttattatgtcaggcaaagtattaaatggttgtcacttaggtggtggtttgcatcacgctcaacctggtcgagcaagtggtttttgtatatacaatgatattgcaattaccgcacaatacttagctaaagaatacaatcaacgcgttttaatcatagataccgatgcacatcatggagatggtacacaatggagtttctatgccgataaccatgttactacttattctatccatgaaaccggaaaatttcttttcccaggctctggtcactatactgagcgcggtgaagatatcggctatggacacactgtaaatgtcccacttgaaccgtatacagaagatgcatcatttttggagtgttttaaattaacagttgagcctgtcgtaaagagttttaaacctgatattattctaagcgtaaatggtgtcgatatacattatcgtgatccactaactcatctaaattgtacgttacattcattatatgaaattccatattttgtaaaatatttagctgattcttatacgaatggaaaggtaattatgtttggtggcggaggctacaatatttggagagtcgtaccacgtgcatggagtcatgtattcttaagtttaattgatcaaccaattcaaagtggttatttaccgttagaatggattaataaatggaaacattattcatctgaattattacctaaaagatgggaagatcgtttaaatgattatacctatgtcccccgcacaaaagaaattagtgaaaaaaataaaaaattagctttacatatagcgagttggtacgaatctactcgtcaataagtaacctaatctgcaacgattttaaaagataaataaaaggcattcttccaacacccatataatttgggtcgttagatgaatgcctaattttgtgaatttattttgtagttcctcggtattcaattctgtgaggtaaaactacatttggttcttctatcttttcatcgttcatatattttgttaataagcgcatccctactgcaccgatatcatataatggttgaataacactagaaagttgtggtctaaccatctcaactaatcgtgtattattgaaactaataatttgtaattcctctggaactttaataccagcatccattgcactatgcataataccaattgcttcttcgtcgctgatacataaaatggcatctggcaaattgcctttcattttggcaaaagcttttacgccttctttataactttcagcaccagaacaattcaatgtatcacctaattgaaggccatttttatttaacacttcagttaaaccttctaaaacatcttcttgagcttttttagaatgttctccacctactaaagcaaatgatttagcgcctttttcaattaattctcccgtaatttctttcgcagcttcagtaaaatcaatattaactgatgctatatgtgcatccttaccatttgttcctgatactactacaggtacagatgattgatttatcaattctttcatttcttcagtaattgtaccaccaaggaaaataataccatcaacctgtttacttaataagttattaaaaatttctttttccttttcaggatcgttatctgaatttgaaataattgagtgatatttatacattgttgcaatatcttcaagtccacgagcaagttgtgaataatagatattagatatatctggaatgatcacacctactgttgttgtctttttactagctaaacctctagcaacagcatttggacgataattcaaacgcttaatgacttcgttaactttatttttagtttctgctttaacattttggttcccattaacaacacgcgacactgtggccatagagacacgcgcttctcttgctacatcatatatagtaactgtcataatttcctccttgtaaacgttttattcattataataacatgttttcatttcattttcatagtttaccatattttaatttacagtaacatatttttgtttggaaaaatttagcgaaaagcttgaaataaaaacaaacgctaaatgataacgaacgatatattttaattttatataaacttttttcatttttaattgtaatgttttgagaaagccttttcaaatatcaattgcatttgttgaaaaatgttcacatttcagcaacaaatgtgtgaatctattatattttacagataattcatagttataattttaattactgctatcagtcataatctttaataattgtgaaattgaacaagtgtcgaagtattataacaatcgttaagtgcagtatacctttatttctatacaaaaaataatagccactctaaaagtaatatactcttagaatggctgtaagtttaaaattgtcgattcaaagataatattctacttcaacatgacatattagttaagtagtctatagtttccttggaatattattttaactttttagcgttatataaatcagctaaaggctttaattcatcataaaatgcttggaattcatctaaatccatttgttgacccgcatcactaagtgcaacagatggatctggatgcacctcagccataactccatcagcaccaactgctaatgctgctttcgcagttggtaacatgatatctttacgacctgtactatgcgtaacatctaccatgactggtaagtgtgtaccttgttttaaaattggtactgctgaaatatctaaagtgttacgtgtcgccttttcataagttcggattccacgttcacataaaataatgttttgattaccttgtgaagcaatgtattcagctgcataaacaaactcttcgattgtagcagataaaccacgttttaatagaataggctttttcgtacggccagcttcttttaataactcgaagttttgcatattacgtgcaccaatttggaatacgtctaaatactcatcagccacttcaaaatcatttggatttacgatttcgctgacaacatttaaatcatatttatctttaatctgtttaagtattttaagtccttcaacacctaggccttggaaatcatatggtgatgtacgtggtttaaatgcaccgccacgaataaatttttcacctttagcatgtaagtttttagcaacagcttcaacttgttcaaatgattcaactgaacatggcccaaatacaaatgatttattgccgtctcctataatgcccccattatcaaatgttacaatcgtatcttcaggtttcaacttacgtgatacatataaatgtttttcattttcagatttttgtaaatctgtagaggctttgaaaatttctttaaataattgcttaatagtattatcgttgaatggtcctttgttactatcgattaagtcgttaagcatttctttttcacgttgtggatcataaatacgtgtaccttgttttaatttttcttccccaattttttgtgctagttcaccacgtttagataataagtctaaaatttgatgattcagtgatacaatctcacttctgtatgattctaatttattactcatccttactcacctctactaattatttcaagtatattccactttaaagcaataaaatataatgttaaaaaatattctaacaatatcatatgtatagttcaaccctaaattgacagaaaataatcaattttctaattatatgattcgagactgacatttcgattttctcagtcattattggaaagttatattctatattgatatttattagcaaatgttaatcaattaaataagtgtcattattatagcttattttgagtcaacattactgcttttaagaaaaattttcgtttctatcttctattataaatctaaaattctcatacattcaacctaacgcttaataaaaattaacaacctttgtctttgtatattaatataaatctatagtgaacatcactcaccaacacattcagctatatttaaattagtgaacgtcattgtaccttctaaaattcattgtttatttgattatcgaatatttttccatcttcagcttaaaatgtgcaatatcactattgttatctaacgatgtttcaaacaacataaatacatgaaatgatcgcattgcctttcaaaataaactgatgatatcaaaaaaggtaagcacctgaatgcctaccttttattttgaaattcaatttttaaaaatatattacatagcttactgctatgattgattattcaacgattttagtaatcttagtcattgaatgtacgtttctctattttacttttagctttctcaactttagcatttggcgtttttgatgcattggatgatttagcatttgttgtttttgaattcttattactagtttgattattcttttgagttgacttacttgaactactttgtttctttgcaccttgtgatgatttcttattatgttgctttttctgacctgaagttttatttgtagatgcttttgatgcatttcgtttatttgaaggtgttgtttttttagattgtttacctgatttcttgtcaacagctgtattattagttgttttttcatcagctttacgtgtaataacaccattttcaaatttagcttctttttgtttaacagtgtctttattatctatattaaccgtctctgtctctgatacatcattctttttagtaactaattgaggaatttctttcaagtcatttttagcaactggtttttctgcaaataacgcttcagttaattgactctcttttgaacctggtgttaatttagcttgcttctgttttgcagcgtttgctaatctttcagcttgtgactctggttttgatacttctacctttgctgcacttgcatctttagttaatgtgtcactgtctttctctgcttgtgcttcttttttagcttcttgaacctcttgtgcctcttgtgatatatcacttaaattatttgcacttgcttcttcttttatcgctgcttgttgtgctttcaatgccactgcttttggttcttcatttgatacagctgcacttttatctgtttctgcttgtgcttcttttttagcttcttgaacctcttgtgcctcttgtgatgtatcacttaaattatttgcacttgcttcttcttttatcgctgcttgttgtgctttcaatgccactgcttttggttcttcatttgatacagctgcacttttatctgtttctgcttgtgcttcttttttagcttcttgaatctcttgtgcctcttgtgatgtatcactcaaattatttgcacttgcttcttcttttatcgctgcttgttgtgctttcaatgccactgcttttgattctttatttgatacagccacacttttatccgcttctgcttgtgcttctcttttagcttcttgaatctcttgtgcttcttgtgatgtatcacttaaattatttgcacttgcttcttcttttatcgctgcttgttgtgcctttaatgccgcttgctcatttttagatttgtttaaaaatccttcaacacgttcttttgtataggcaaccgtttcttcaagttgcgtttttctttcttcaaacttttgcgacagttcttgttctttgacttttaaatcatctgctttttgataaactttatttttaaaatacaaacctaaagctgaaccaacaagcgcgccagttataaaactaacaacaaaatctttacggtttggtagtggttcattttgataagtgtgtttattttttaatgttcttttatcattttgttgctgcgtcatttgtatatcctcctataacaaatgcacttaaataagtaacaacctcatttaagtgcatttgtttaattattaattatttatctactctagaagtatagctatgatttgcatcagttgctacattattagctttgtaatttgcacttccacgacggtagtgtctattttgccatttgtctgcaatttccattgcaacatttgaccattgaacaacttgtgagattttatcttcattttgagaaatattatgtgtaattgaatttgttacacgatctacagagctgtttaacgtttgtactgagtcaccgatacctttaacagcatctacaactgagtttaaacgatctactttaccttggatatcctcagttaaacggtttactttatgaagtaaatctgttgtttcacgagtaataccttgaacttgaccttctacaccgtcaagtgtttttgcaacataatctaagtttttcttaacagaatttaatacagctacgataccgatacataaaattaagaatgcaatcgcagcgataattccagcaattggtaaaatccaatccattaaaaacgcctcctaattaacatgtaataatgtcattaataataaatacccatactactctattataaacatattaaaacgcatttttcatgcctaatttatctaaatatgcattttgtaatttttgaatatcacctgcacccataaataaaataacagcattatcaaattgttctaatacattaatagaatcttcattaattaacgatgcaccttcaattttatcaattaaatcttgtatcgttaatgcgccagtattttctctaattgatccaaaaatttcacataagaatacacgatctgctttacttaaactttctgcaaattcatttaaaaatgcctgtgttctagagaaagtgtgtggttgaaatactgcaacaacttctttatgtggatatttctttcgtgctgtttcaattgtagcactaatttctcttggatggtgtgcataatcatctacaataacttgatttgcaattgtagtttcattgaaacgacgtttaacaccaccaaacgtttctaatgcttctttaatatttgtaacatctagcttctctaaataactaatcgcaattacagctaatgcatttaaaactgtatggtcaccatattgtggagacaggaagtgatcataaaactcaccatccacatacacatcaaaagcagtacctttatccgtaatttgaatattttgagcataaatgtcatccgaatctttaaatccataataataaattggaacatctgcttcaattttacgtagatgttcatcatcaccccaagcaataataccttttttaacattatgtgccatttcttggaatgcatcaaaaacatcattaatatctttaaaataatcaggatgatcgaaatcaatatttgtcataattgcgtaatcaggtttataacttaaaaagtgacgtctatattcacatgcctcaaaagcgaaataatcactttcaggcaatcccatacctgtgccatcaccaattaaaaatgaagtctttttatcaccattcataacatgtgataataaacctgttgtagaagttttaccatgtgcaccagttacagctactgaagtatattgatcaataatctgtcctaaaaaatcattataacttacaacatctaatttcaattgatgtgcacgtactatttcttcatggctactcgcgaatgcattaccttgtataactaccatatcttcttttatgttattagcatcaaatggtaatatttttatccccttatttctaagagcaacttctgtaaatacgtagttctcaatatccgatccttgaacttcatgtcctaaatcatgcatgatttgtgctaatgaactcatgccagaacctttaattccgacaaaatgatagtgtgtcattatataaaactccttactcataattattctttatttaaatctgcttccgtaacataaacatcccttggttttgaaccattagcactcgaaacataaccgagttgctctaattgatcgataattcttgctgctctattatagccaatttggaaatgtctttggattaatgatgttgaaatatgtccttcattaaccataaatgcacaaacatcatcaaataattcatcttgtgattgtgtttgtgtttttttcaacaattctttttcttcaaatagatagtccggttctctttgttgtttgataaaatcaacaacatcatcaatttcgtcatcagaaacaaatgtaccttgaactctaatcggtttattcataccgctaccaagatataacatatcgccatatcctaacaagcgttctgctccaccactgtctaatatcgttctcgaatctacacttgatgataccataaatgcaattcttgttggtatgttggctttaattaaacctgtaattacattgacagatggtctttgcgtagctactaacatatgaataccacatgctctcgctttttgagcaattctagcaatagactgttcaacttcttgcggagccatcatcattaaatcagccaactcatcaattacaatgacaatttttggcattctttcatcatatggtgcttttttgttaaatgctgttatattacgtacatggtaatgtgcaaataacttataacgtcgttccatttcttctacggcccattttaaactctgtgtagctgctttgacatctgtaattaccggtgcaactaaatgtggcaaaccattataaggagctaattcaaccatttttggatcgataagtaataatcttaattcctcaggatgatttttatatagtaaagacatcaaaatactattgatacaaactgatttccctgatccagttgcacctgcaattagtgcgtgtggcgttttagcaatatccataagtaatggttcattattaattctataccccatcgcaactgttaatttagattcagcatttttaaaacttggagattcaataatagaacgtaagttgactgtcgttggattttggttcggaacttcaataccaacacgactagttcctggaataggcgcttctatacgaatatctttcgctgccaatgccattttaatgtcatcttgtaatgccgtaattcttgaaactttaacacctttttcaactgataattcaaatcttgtaacacttggaccttcagttacatcttgtacttctgcaggtacattaaagtaaaataatgcgtcattcagttctttctttttatctgtaatccagtcctcgtccgactcaataacttgtggttcttctagtaatgaaacacttggcaatttaatatttgggcctttacgaatcatcggcttagatgtttgtacagcttgatttgttgcaacatcttgttggttcgtccgaggtctattttcattagctgtatcttcatttttatttgaaaatgatgactgtaaatctttttgttgatcatcattatcttgttgtccactagtattgtttggatgtgttgtttcttcgctttcttcagttatgtcgcttacttctgaaactgaagacgaagttgattgatcaacttgctcattttccaattgattatcatcttgactttcttcaaatatttccgtttgagttgaatcaacagaaggtttctgctctgaatattgttgtgcattttgataatcattttctgtttctgcatgaccaataagttgattgttctcaacattgtttgatgtcatattatttgttttatatgcatttgtatttgactcttgtgaatcagatcttgatgatggtgtggcttgactcgcaggcattctttcactcacagcttgcttactttgtacaggctttaattcaggcacattgacttttgaatgctttttacgatccatcatacgctttttatcagatggcgtcatgacaacattaaatggtcttttacttaaagttgaaaccttttcagtctgtttctttggatttacgttttcaatagttttctcttcgacattttgttcactttcagctgcttcgttttgcacattttctgtaatttctgcgttattcttttctatttcattcatgcttgaatcttccacaacatgattatcattcacatcattcgttttcaatgagttgacacttaagtttgtttggtcatcttttttatgacgcggtgctaattcaatttcattatcaaccgttttatcgatattatttacttgagattcagttactgcgtactcttgcgttttaggagcgtctacatgcatttcagacgcgtttctattggtattatcttcgatatttgaagtagtatcctcatctacttctgtatcatttaattcataaaattctgcatcatcgatttgacttcctgaatattcttctttattcgttgctccatcttcttctgaatcagcaattaatctggattgattttttagttcatctttatcatttacttcaacgttatgttgtagtgctgattgatgttgagacgttacattcgaaaccgtaacttcatcatctgacaattgttttgttgtcgatacttgattcaaactaacttcctcataattgtatggactttcatctacatgagtgtcattagtgtcttcattttgtattgacgcttgtttattttcatcatttgatacagtttcattctctatgccatttgtatgaagctgactagcatctgtactattatctgttaagtcactatcatcatttaatgaactatcaccaacatagcgttccgcttgtttagcatacatttcatcaattgcacgttgtattgcatcttgctcttcgtttttatgttcttcacgcttttgttgcaacgcttttttaaatcgacgcttttgaagcactttacgttctcgttcacgtctaatttcttcaacaatttgtgaagcataaatattttcaattttgatagtattatcaacttttgaataattaggcattgattttgttgttgatgatacattttcatcagatgatttagatgcagttccttgtttgacaacactatcattttgtttttcttgttctaattgtttattttgagacgtttgcgtcttagctacatatttatcatatttttgtttatctgactcaactttttctgaaggtttacttacagggatacgaccattttctaactttttaggtttcattgtgccaaaaatagctgacggtacctctgaagtcttgaaactttctttgtgataatctggagttgaatctttagcacgatgatttgtattattagaatacatattatgtgtttttggcttgtgcgtttccttctcaataccattaattgcagaaacatatgtacctggcttattcgtatggtaatgtgaatgatctttatattttatactttgctgtgatattttagaattcccacgttgttcactataattttgttcttcagttgtttgatttcttctacggcgatgtcgtttttgtgaacgagaatcgtggctttgtttgcgatagtctcgatggtattgttctttttcatctgaaatagtatctgcagattgttcaacattttcattttcataagctacgctcataggaaaacggaattttcccctcggacgactataaatatcattattttgaggcagtaatgagtcatgatcgttatctatattttgtgattcttgacgtctttttttctttctatgaatcaagtcatcatttgaatcattatcttcgccgaataatttatcaaaccagctcatattttcactaccttccttaattattcaaaaaatgcttgtccaatttcatagctgtcatttaataccataatacctttttcttcaggtgcattaggtaaattcaattctttcattgaacaaatcataccgcttgaggcaacaccacgtaattcagcatctttaattaccataccgctaggcatcactgcacctactttagcaacaacaactttctgtccagcttcaacgttaggcgcgccacatacaatttgtaatgtgtcatttccaacgtttacatttagtacacttaatttatctgcatcaggatgtttgtctttagtttcaacgtagccaactacaaatttcggtgatagatcagcatttaatttataatcaaaaccagcttctgaaatacgcttttggaatacatttacaagttcatcagttaatttaatatgacctttttcttcaattgttatatcttttgaaatttcaaaaatattataacctacaacattaccttcattagtaatttcaacaacattaccttttttattgtagtttaattcaccttcaactggttcaatttgtaaaaatgcgacatctcctacatatttaggattgtaaaataaattcattatgacaaaactccttatccaattatttctatttatctttattaaatttacgacgatttgcttctaaacgctgaatcacgtttggatctcttttttgtttattatttttacctaaaataaatatcggttcaagatgaccctgtttatatccaaaggataatgatgtaattggaactagacctttagtgaaaaattccattgttaaatgtgccatcacatcatatcctgttttattgcgtatatctgcaataattaacacatcttggtgtggcactgctacgagcatttcgccttgacattgtgcctcaatttcatttaaaaatgcagtatttagtatcctacttgcatcatacccgtcatttgagttaataaaataaaaaatattaccttttacttcatcagtcgtatatgaatttgacaattttctaacattaaacagagacatttctcttatttgttgttcagttaacttcaaatcctctaacatgctttcgtcaattagacgatatgatttccctaaatcgactgcataataaactgctgtttctgcagtatgctcatcatagataaaaggaacaccttgtttagtttttttatcaaagctagtcgctctaatgacaggcataatttgactagatgatatactctcaagggttttatctgccatttgtgcaatagcttcatcaacgtaataaacaatttcatctacaattttttcttttttatcttcatattttgcgactatagcgttaagtttaatcgtgatacctttgttattatctgttcgataaatacgcaaagtttcttcttcacgattaaatttaaaatcaacgtctaaatggcttaaacgttcctttaatttatctctcatttgaaaggtattcatatgtaacactcctaatttcgcaccttataatagtttacaataaatcaacacatagtaacagagaaaaacgagtattaccccgtttttctctagtctaaattacacgtattgagctaaaaatgcatctatctgttcaattgattttcgttcttttccaatataacttccaagcagttctccatttttatatactagaaaacttggaatacccataataccattttcaatacaaatatccataaatttatcacggtctactgatacgaagtcaaacataggatatctcgcttctaattccggtaaatctggttctatcactctacaatctggacaccagcctgcagtgaattcaaatactgtagcaccttgttttaaagattcaaattgttgttctgattcaagttgtttcatttttatgtctccttaattaatgattatatataactatttagagataatagttgttattacccgattatttatattgtaatgtttctatttgattattatctaaattacaaatggcttctgaaagtaaagatctagctgcaaaatagtctcttatatcaaatactgagtctgtactatgaatatatcgtgcacatacaccaataactgcagtcggaataccaatattagctttatgaatttctccaccatctgttccacctggtgacatatagtattgatgttcaatgtcatgtgcttctactaactttaataaatagtctctaaatacaggctttaaaatcattgtaccgtcttttatgcgaattaacgtccctttaccaagttcaccagataatggttggtttcctttaacgtcattggcaggtgaacaatcaactacaaatgcaacgtctgggtctatcatctctgcagatgctttcgcacctcgtaatccaacctcttcttgaacatttgcgccaacatacaagtctacatctaattctatatcttttaataattctagtatttcaattgccaagacacaaccataacgattatcccatgctttagcactatatcgatgttcagataactgtgtgaatggcgtgtgaggtacaattgtatctcctatatctattccgcgctcacgcacctcatcttcattttgagcacctatatctaatgttaaatctttaatttccggtgcaccttcactaccagtacgaaaatgtttaggtatattagaaacaacaccgataattttatcgccatttctatttttaattactaagcgttgtccttgccaaatatcatttgcaacaccacctaaatttgtgaattgaatcattccatttttagtgatatttgtaatcataaatccgatttcatccatatgtgctgcaatcattacacgttttgcatttggatttttagattttttcacaccaaaaaatccacccatacgattttcaataaattcatctacgtacggcgccatttgctgagtcatataattttttacttcttcttcaaaacctggtgccccatgaagctcagttaaagtttgaattcgttgtaatgttacttttttatttatgttcataaaagttctcactccttataagttattatatcatcttcaatatggtaaactaatgatatgaatttgaaatcaagggagcataaatgatgactaaactgaaatatataattccaacaataattgcagtagccattgtaattatttctaccatttcaatcatccaatttattaatcgtaaacgctataatcccgttaaagtacttaatgaagtaaaatcatattttatgaatgtcaaaggctcatatatcgtttatgaaccattcgttcatcctgaaactgataaataccgtttagtttatcaaggtggaattacaactattaaaaatggtcaaaatattcattatgatttttatgcagatgcatatactggtgaagtcattaacattgtagagcgttaatacgaattttatccatatttgatttggatcgtaaaacttaaaaatgagccacaccctaattagtaagattggatgtggctcaattttttatttttgaaaatttgtttagtaatacatctttattttagttattatcaactaatgtttcacgtaaaatatatgcatctatgttttcaccattatcgctgtattttacagcaaagtagttttcatcatgataaaacaagaaccaatattgttgctgaataaaatatggtatcatgcgttctttttcacgaatcgattgcataggataatcatcatatgccgttacccatagaggatttttatgtgcagtagttgggaatatatcacccatatgaactgctttatctccttgactttcaatcgtaataatcgtgtggccaaagctatgacctccactatgttgcatcttgatacccagaaccggttcaaaatgtttttcgaataaaatcaacttgttactataatcgcctttattcttatcccagtaagttgatttacttcttatattaggtgcaataaactcatgccactcatcttgttgcacaacatgaatcgcattttcaaaaattgcatgtcctgcttgatcagtcaaaccggcagcatgatcaaaatgcatatgtgtcattagcacataatcaatatcctttggcgttaaattataatttgccaaatcagcaattatatgactttcttcatctactccaaaattacgtaattgcttttcagataatttaccattaccaatacctgcatctataatcaaattatattgagccgtttgaatcaaaattggatgtgtcggtaaattgatttgatttcgttcatttgcattgtattgctttgaccacaacggcttcggaacaacaccaaacattgcaccgccatccatttttgtattgccaccatttagataatgaatagatatatccccgattttcataacatcacctattctttctgtattcgttattacaattagcatgtgtttattacatcatatcactattcataaatgcgaacaaaaacgaaacgccccacactaatacacttctaactacttataaagattaatgcaatcatattatatgtaaatgcatcataaccatcggcctgtaattttaaattaataattaaaatttacaagtaaaatgcaagctttattcttttaaatcaaaggtatttagtataacattgttcataggcgcattatctcctttagttatttgtttagtcacttttaattatagagataattgcgctttttttatattcaaaatcaaaaaatcggacagatgaaaagttaaaaactttttccatcagtccgatttattatagaacctttatctatagaaccattatagtacgaaaaaacacttatgattgtatgtgtacataccctcataagtgctctatttttgtgaatggaatttcgcttccatacgataaatacgtgaccctttatccgaaaatttcttttcatattctgttaaaatattactgccatcgtcttcttgatgtaaatttagatttatttttgtaaaatacattccaaattgagacatactttctaaactgtaggcaaatagtcctctgttatcagttttaaaatgtaaatctccttcatcatttaagatttgttgatacaacgctaaaaacgtatgatacgttaaacgtcgttttgcatgacgattttttggccatggatctgaaaagttcaaataaatacgcgaaacttcgccgtctttaaaatattcatttaattcaatggcgtcattacaaataatctttaaatttgttaaacccatctctttaactttatccaatactttataaacgatacttttctcacgttccattgaaatatagttaatatgaggattttgagcagctaatgttgtaataaactgccccatacccgaaccaatttcaatgtgtatcggttgcgttttatcaaaccattcagtcattttccctgcatgttgaccgtccatgtcaaccaattcaggatgatcttttaaataatcttcagcccatggtttgtatcgaactctcatattttattctcctcttaaataaacatgttactattcataacttcatttaggaatttaagccaagtgttcatatccttatatcttttttgctcttcataccattgaacaagacctatagattgaattaccgtataccatttcatacgtttatttaaattcaagctctcttgaacaccatatgtttcaagccattcagaccattgttgttgtggaacatagttgtaaagcagcattccgatatcaattgccgggtctgcaatcattgcaccttcccaatcaactaaaaatagttcatctcgatcggataataaccaattattatgattcacatcaccatgtacaacagtgaaaaaacgcgaatctaaactcggtatatgctcttctaaataggttaatgattttctcacaatatgatgtgttaaaacttctcttgataaagaggcattaattttattaagcataatctcaggagtaataggttccatttccatacgctttaacatacttaataaaggtctagaattgtgtatcttctttaataaatgtgcaactcttgtttgcttcatttcgtttgaagatagttcacgcccatttttccaatgttgtgctgtaacaacctcgcctgtttctatgcgtttcgtccatactaatttgggcacaataccttctgctgataatgccgcaataaatggatttgaatttcgttttaaaaacaacttttgtccatcttgttcagccatatatgcttcaccagatgcaccacctgctgaatcaagtgtccaccctaattgataaaactgctccaactcgtccacctcactttcaattagaaaatggctctagaaataggtttttcaagagccatatattctaatttataacaccatactggtacaaatattatgtccagataattattgtaaatcctcaaccaatgcctacattacacgactaaatttaaatcgtaatgtctgtcattgacaccatacattctatagtcacttacttgacatataatgttaccgtgtctaaaactacatgtttttgaatctctgtaggcgataaactctagttttcaaaataattgctatcccattttcatggttagcataaatttatgaactgtaacatttacgtacttagtaaaatatgatgcacatcatatttgtaactcatagaaaattttataatttttatcattatatttcaactgaaaatgagaaacaaaatggcactttttactaatatgtgttttctaaacaacacttttaagcttcgttttaaattataacataattcacttacgaaagttgataaatttaagtaatttaatctaaaaatatgatgaaagaattttaaatactgtgtgactctatatacttttcaaatccttcttgtagttgacgtgtaattgggccaactttaccatcattaactggttcaccatctaatttaataacaggtgtaacctcagctgaagtacttgaaacaataacttcatctgcgtttttcaagaaatctacagtaaacgtttcttctttaaatgggatgttatagtcttcggcaatttttttaattacaattcgtgtaataccattaagaatatagttgttaatcggatgtgtataaatcacaccgtctttaattgcataagcattacttgaagatccttcagttacagtttcacctcgatgttgaattgcttcaactgcattatatttcacagcatattcttttgctaatacatttcctaataagttcaagcttttaatgtcgcaacgtaaccatcggatatcttcaacggtaacaccattcacaccattttctaaatgatcataaggacgatcataactctttgtataagcaacaattgctggttctacttcaggtgtcgggaagctatgattcctttcagctacaccacgcgttgcttgaatataaattgccccagtttcaatttgattcatatcaactaatttacgagatagttcaattaattcttctacagaataatttaaatctaaaccaatctcattggcactacgtaaaaatctttcataatgttctgttactgtaaataacttaccattatatactcgaatgtattcataaataccatcgccaaatacgtatcctctgtcgttgtatgaaacctttgcttcacttggacttacaaactcaccatttaaaaaaattttttccatatattattcctccacgcataatgaataaattgcttctaagtaaatactagttgcgttaaataactgttttttagtgatatattcatttttctgatgcattaaatcttcagaatcactaaacattgcgccaaatgctacacccttgtctaagtttctcgcataagtaccgccacctatagtataaggttcagtcatatcatttgtttgatttctatatgcagtaactaacttttgtacaaaaggatcatttttatcaacataatgtggtggttggactttacctaatttcacttcaaagccatattgttgaatctcatttgcaaaacgatccatagctttttcaaattcaaatccttctgggtagcgtaagttgataccgaaaagacctgcgttttcattatcatatgtaataacaccaatgttagttgtcacgtcacccatgacatctgtatggaatttcattcccatcttttcaccaaaatctgaattaaataagtagcgattactaaatgctacaaacgcttgtgcattattatcaagatttaatgatgctaagaattttagtaagtaaagacccgcattcacaccgatagatggatccataccatgaaccgctttaccttcaactgttaaaactagaatgccactatcaacagtactatcaccttgtaaatgattttgttctaaaaagtactcaaagtcttgaataacatctgtcatattttctttaacaagcactcttgcttctgcatgatcaggtaccatgttgtaacgttcaccagatttaaaagttattaattcataatcaggttcatcttgatcttcagtaagtttattttgaactaaatcaaatgttgtaatgcctttttcaccatgaatacatggaaattctgcatctggtgcaaaacctaatgttggcatttcttctgttttaaaatagcgatccgtacatttccaatcagattcttcatccgtaccaataatcatatgaatacgtttcttccaatccacattcatatcttctaatatcttaattgcataataagcagcaattgttggacctttgtcatcaagtgtacctctagctatgatagcatcttctgttacaaccggctcgaacggattactatcccatccatcaccagcaggaacaacgtcaacatgacataagatacctaatacgtcatttcctttacctgcctcaattcttcctgcaatatgatccacatcatgtgttgtaaatccatctctatgtgcaatttcatacatgtagtctaatgccttacgaggacctggaccaactggtgcgtcttctgatgcttttgcatcatctctcacactttcaattgctaataatccttttaagtcattaatgatttgatcttcgtattgttgaactttttctttccacattcgaaatcgacttccttttttctataagttaaattctattttacatgaaaagatataaaaactacaataagatgtcagaaaataataaaaaggaacaaaacgatgctattgatatgacacaaatcataaatagctgctttgttccttttttaatttatatatttaaaatacacatattcaagagctcgagatataagtcaatgtactaggcacacaatttaatattgacagtaattaaccgaacgaaaatgcgccccggggccccaacatagagaatttcgaaaagaaattctacagacaatgcaagttggcggggccccaacatagaagctggccaatagttagctttcaataatgtgcaagttggggtaagggccccaacacagaagctggccaatagtcagctttcaataatgtgcaagttggggtaagggccccaacacagagaatttcgaaaagaaattctacagacaatgcaagttggcggggccccaacacagaagctggccaatagtcagctttcaataatgtgcaagttggggtaagggccccaacacagagaatttcgaaaagataaagaaatacgttttctttagatattagtatttcttatgaatgagtttcacgcatgtattcttctttctatatgcatattagctatgactaacgataaagaacctgaaacactaataaatgtcctatagtttacaatattatattggcagtagttgactgaatgaaaatacgcttgtaacaagcttttttcaattctagtcaaccttgccggggtgggacgacgaaataaattttgctaaaatatgatttctgtcccactcccttatcatttctgtcctactcacatcttattctttatcagataatgcatttttattcttttttaaatcttcttcagtgacgatacgtaaattattatttggtgctgcgccaccttcatcatcaaatttacctttttcaatactttcgtcagtcttattgtcatattcggtaaattttgatttttcttctttgaaaaatgcttttggattattttttaatctattagcatattctttcggatttgtttttacttctttaattgtttcattagcaattgttcctaattgcgtcgctttatccttagcattatctttatagctttgaggatcttgtttatatttattatattctgctttcagcttgtcacgactatctttacgtgtaacaagtacagctgctacagcgccacctatacctaaaatcgctttaaataaattaccttttgccatatcaatcgtctcccttttatttataatttaatttgtcaaaatcattttcagttaataaacgatattctcctgaatctaaattgctgtccaattctaaatcagcaattttgatacgtcttaaatgtaatacctcattttgaatgctatgaaacattcgtttaacttgatgatattttccttcataaattgttacgtgtgacgtttgattatcaatataagttaatattgcaggcttaaccttgccatcagtcagtgttacaccctctttaaaagcttgaatgtcgtcttcagtgataggatttgctgaaataacttcatattttttagaaacatgtttgtttggactcattaattcatgattaaaatcaccatcattcgttatcaataaaagcccttctgtatctttatcaagacgaccaaccggaaaaatatttagatgttggtattcaggtattaaatcaataacggtttttgaatgatgatcttcagttgctgatatataaccttttggcttatttaacataatatagacattttcaatgtattctattaattctccacgaactgttatcttatcgttttctggttctatatgtgtttttggtgatttaattacttgttcgttgacatttacaaggccttttttaagtaactgtttgacctcattacgtgtaccgacgcccatatttgctaaaaatttatctattctcatcgtaaaaacctaactctacgtcttaatttttcaggaatttcacctaagaattcgtccgcaagacgcgttttaattgtgattgtaccgtaaattagaatacctactgtaacacctaaaataataatgattaagtaaccaagtttagtaggttctaagaatagatttgcaaggaaaaatactaattctacacctagcatcataataaatgaatacaagaatatttttgcaaaatgaatccaactatagctgaatttaaacttcgcatattttttaagaatatagaaattacatccaattgcaaataataatgcgatactagtacttaaaattgcaccaggtgtatggaataacataattaatggatagtttaacgctaacttgataactacagaagctaaaataacataaactgttaatttctgtttatctataccttgtaacattgatgccgttacacttaatagtgaaattagtattgctacaggcgcataatagaataataagcgactaccatcatggttagggtcatgacctaaaacaattggatcgtaaccatagaaaactgtgaataatggttgtgccaaggccataattccaatactagctggaacagttataaacattaatacaccaatagatgttctaatttgatgatgcatttcatgtaagcgaccttctgcaaatgtttttgtaatataaggaattaaactcactgcaaaaccagcacttaatgatgtcggaatcattacaattttattagttgacatatttagcatattaaagaatatatcttgtaactgtgaaggtataccaactaaagataaagcaccgttatgtgtaaattgatctactaagttaaataatggataattcaaacttacaataacgaacggtatactataagcaataatttctttatacatcttgccatatgacacatctatatctgtgtaatcagattcgaccatacgatcaatattatgcttacgctttctccagtaataccagagtgtgaatataccaataatcgcaccaactgctgctgcaaaagtagcaataccattggctaataaaatagagccatcaaagacatttagtactaaataacttccgattaatatgaaaatcacgcgtgcaatttgctcagttacttctgacactgctgttggccccatagatttataaccttggaatatccctctccatgtcgctaatacaggaataaagataacaaccatactaatgattcttataatccaagtaatatcatcgactgaccaaccgtttttatcatgaatgtttctagctaatgttaattcagaaatataaggtgctaagaaatacagtaccaagaaacctaaaacaccggtaatactcattacaataaaactcgatttataaaatttctgacttactttatatgccccaatagcattatatttcgcaacatatttcgaagctgctaatggtacacctgctgtcgcaactgcaattgcaatattatatggtgcataagcgtatgtgaacggcgccatattttcttgtccaccaattaaatagttgaatggaatgataaaaagtacgcccaataccttggtaattaatatactaatggtaattaaaaaggttccacgcaccatttctttactttcactcattacgaatctccctatctcatgtttattaaagttttgtaaactaaaagctgtttctctgtaaaatcatttttcattattatgaatatatcacaaaactttatttcattgtcgtatattcaatgaattatcataacaaaattatcaacacattgtcattgaatactagattttgattagaatattacgaaatttcatataaacattatactactatttgagatgaacatcgcataacagtagaaaaatcattcttatcatacacatacatcttcattttttatgaagttcacattataaatatattcaacataattgtcatctcataacacaagagatatagcaaagtttaaaaaagtactataaaatagcaattgaatgtccagtaacaaatttggaggaagcgtatatgtatcaaacaattattatcggaggcggacctagcggcttaatggcggcagtagctgcaagcgaacaaagtagcagtgtgttactcattgaaaaaaagaaaggtctaggtcgtaaactcaaaatatctggtggcggtagatgtaacgtaactaatcgattaccatatgctgaaattattaagaacattcctggaaatgggaaatttttatatagtcccttttcaatttttgataatgaatccatcatagatttttttgagtctaggggtgttaaattaaaagaagaagatcacgggcgtatgtttccagtttccaacaaagcacaagacgtggttgatacattagtgacaactatcgaacgccaacatgtaacgattaaagaagaagaagctgttagtagaatcgaagttaatacagaccaaactttcactgtacatactcaaaataatagttatgaaagccattcgctagtgattgctacaggtggtacaagtgtccctcaaactggttcaactggtgatggttataagttcgcacaagatttaggtcataccattactgagttattcccgaccgaagttccaattacatcagctgaacctttcatcaaatccaatcgtctaaaaggtttaagtttaaaagatgttgaattgtcagtacttaagaaaaatggtaaaaaacgcatcagtcatcaaatggatatgttatttactcattttggtatcagtggtccagctgcattaagatgtagtcagtttgtttataaagaacaaaaaaatcaaaagacacagcacatttctatggcaatcgatgcatttcctgaattaaaccatgaacaattaaaacaacacatcacatcattattatcggacacaccagataaaatcattaaaaacagtttgcatggtctaattgaagagcgctacttactgttcatgctggaacaagcaggaatcgatgaaaataccacatcacatcacttatcaaatcaacaattgaacgacttagtaaatatgtttaaagggtttgtatttaaggtgaacgggacattacctatagataaggcatttgtcacaggtggtggtgtgtcacttaaagaaattcaacctaaaacaatgatgtctaaattagttccgggattatttttatgtggtgaagtattagatatacatggttatactggtggttataatattacaagtgcactcgtaacaggacatgtcgctggattatatgccggacattactcacatgcatcaatggaataatagtataaaatttggttcgattctctttagtagatcaactttttcattcaaataaaaatgaccttaatataactgagtcactaaaaagtgtcgttatattaaggtcatttcgttaattatgattctttttcgtttttagtacgtcttctagctaacaaagccgcacctgtaatcagtgcaaattctttcaatggtaaatccattccttcagaacctgtatttggaagttctttttcaactttgcgcgattcatgtgtctcttcttttttaataggcgtacaaacttttggagctggctgaatttcttttggtgatactttcgtcgcttcagctggtaatttaattgctaaaatttcatcaacaatgaattgcgtgtgttgtttgatgtcatttaatgtcgcatcttcatcaatcattctattgccatctgcaacatattgatcaattaatacttttactttagctaattgttctggtgttgcgatcgctttgaatttcgcatatgtttgttgagcaatgttatcaattcgcagtaagctattttctttttcagtaattactgcttctatatcgcttaatgcaacattaaatcgttttaaaactgcatcaacatcagcattagtgcgtgctgtttttaattcttcatccatttgtaattttaaagcagttatagcttttaatgcatcagccttattacgattacttacttttcgataattttgcactaaagcagtgacgcgtgcaagatcatcattaatcgttttttcagcatctggctttttaataggatgtacatctaaatcatgtattgtttgtagatttaatgatgctgttttatcaacttgtgcattgctacgatcttgatcaatttgtccaatagcagtgtcataaatattttgtaactgtgctaatatactatttctttcttctaccgttgcttgaatattcgcttcaattgcttgttttttatcgttgaataatgttgtcaattgttctcgagcagacgcctttctgttaataacaggttcgatttcacgaatttcgtttttctcatcatgcaataaatatgccacatctgcattagtcactgcactagcaatttgttgtttagctttaattaactctttttcaacttgtgctattgcaatattttgttcttcatctgtcgcttcgttatttgctttaattaaattaattttatttgtagcgatattttgaatttgttgtaatgctgttgctttaactgttgtcgctggtttaatttttgaaataatattttgagcatttatactatcttgattaacttgggcagtcttatctgcatgattgatctgatcaatagcctgattaagtgcttgttctactaaatgtttagcagctagtctttcttcttcagttgataaatcgctttgatcgattagtgcattttgagcttcggcttttacaccaacagattgacgcgctgctggtttaacttgaactttaggtaaaatcactttgatgttgtcgttgccatcagtctcagttcgatccacttctgcattcgttttgttttgtgcaatgtcatttttaattgtatttacaattttatttaaagtatcaatagcaacatctctttcatcttgagtagtatccaacgtatttcggattgcatcgagttgatttttattattttcttcaatgctatcaagcgcagctcgtttacgtcttactttaggttttatttgctctattgccttgattgtttgatttctaacatcagtaacagcagcatcttgatttgtattttctatttcttgttgcgcttgtttgagtgtgtcgctaattaattgattcgcttcatctaattcatcaactgttgcatgtggtgtatcttttattgattctacttgattttctgcacttgcttttattgcttgttgtgcttcaggcttaattacaatatgaggttgtacaccttttagtgtagcaatgccatttgtttcaacacgtttcacatcattattcgctattgcttgatcgatgttttgtaatgcacgtttttcattattcgctaattgatttaaagcaacttgtttttcttcatcagtcgcatgttccgcttgctcaatttcgcgctttttagcttcatattgttgcttaactgcatctctagcagctgctctaacaatatggtcaggcgtcactaaagcaatgctatcaagcgcttgacttgttgtatcatcaacttgttgatttgttctattattcgtaatatctgtcatggcttgatttacaaattcattgattttatctagtgctacttgtctttcttctgctgttgcttctttatcctgattaatcttagcacgtaattcattcgctttttgattgattttttcacgtgcagctggtttaacttttgtttcaggttgaataattttaatcgctgatacaccatttgttgctgcttgattcacctgactattcgtttgagcttggtcaatagctgcaagtgctttttctttttctttagctaatgcttgtgaagcaacttctttctcattatctgttgaatcaagactattatcaatttgctgttgcttttctttaacagctttttcaatatctgcaattgcctttgttttaattactacttcagcttcaacattatctatagcatttaccgcttgatttgtagttgtgtctacctgatcatttgtttggttttgattaatttgattaattgcttgatctttaagttgattgatttgattaacagcagcctgcttttcttcgtcagttgcattaggtgtttgtttaaccgcttcaatacgcttcgccacttcagcagtgattttatctcgcgctgcttgtttttttactacatcaacttgaacagcatcgatattattctctgctactgtcgcagcttggtctacttctgcatttgtgttagcttgtttaatactttcaatagcttgttgtctgtcttgatttaaagtattgatcgcagcatttttctcatcattcgttgcatctggtgtagcattgatttcagctaatttagcattataatgctgattgatttgtgctaatgctgcaggttttttaacaatatttggctgaatcgcattaattgcttttgtacctaattgttgcgcttgatctacttccgcatttgtatcagcttgatttatattattaattgccgttgctaactcttgatccacttgatttaaagccacttgcttttcttcagttgttgcatttgtgttttgattaatttcttgctttttagcagttgctaaatcatttaatacacctgtagcagtttgtttcttcgttacatgcggttgaactgcgccgatttgattgactgcatcgtctctaatactattgaccatcgcagtagtagacgtcacaccaatatcagttaatgctctatttttaagtgtattgacacgatttatcgcttcttgtttctcttctcgagtcgcgccagttgtagcattgatatttgttatcgcctctcgcgctttatcatttacaacattgcgagtatccgttttaacttgtgttgccggttgaatcactactatattttgtgtgccctgatcttttgcttgtgcaacttcttgattcgtatctgctgcattaatattttgcttcgctgtggctacagcttgatcaagtaattgttgtgctgcttgttgttcttcgagcgtcgcatcattattattaaatatcgtattatgttgcgtttccgcacttttatcgatggcattttttgcatctgtttttacttttgtagctggtgtaattgcttgtattccttgaatcgcatttgtctttacttgttcaacatcagcattggtattagcgtttaaaatgtttgtgtttgctgcagttacagcagcattcactttgtcaattgctgcttgtctttcttcttgagtcgcatcaggattagcattgatctctgcgatatgttgttgtgcatcatgtgatacggcatcccttgcagcttgcttaacaacagttacaggagcaattggattaatggcatttagaccatctcctttggcgttatcaacattagcatttgttgttgcttgattgatttgttctaaagcatggttggttgcttgagttaattcgttcaatgctgcatttttctcttcctgagttgcttctctattactatttatttgttgtcttttcgttgctgttgcttggttaattgcatctcttgcagcttttttatgagttacttgaggaacaactgctccaatagtattgatgccattatttttagctgtttcaacgtcagcatttgtagtagcattcgtaacattatcaatagcatctgtttcatccgtagctaattgatttagtgcatcttgaatctcgtcttcagtagcatctggtgttgcattgataatttccctttgtttcgttgctttatcacgtattgcttttttagcatttggtttaacaaccggtgttgcagtatccccacttaaggtctgtataccttgatctttgattctagtaacgccatcatcagtcgtttggtcaccaatattaccaattatttcatttttatgttcctcgataacttgtattgctgcttgtttttcttcatctgtcaattcatcattttgattaactaaatcttccatttggtcaacttttttattaactgcattttcagcatcaacacttcgaattaacgtatgttgcatttgattagttaatgaatcaatatatgcttgagaaactcttttatttaatggtacattgttacgattttcatctaaaatcgtttgtgcgcgtcgtttcagaccattaaagatatctaatgacgcaaatgtataatcagcttgttgaatacgtctgtcaacttcggcttgtaatgcatctttattcatgatgatatcgatagtatatggatttgtacttacagtatgactttctgcagctgaattaatgaaatcttgtgtatatgttttatacgttaatgtctcgttaaatgttactgttcttggtgtcggcacattatttacacgtaatttatatcttaaatcgagtattttatcaggcataagtcgtgccggagagtttgctgtacctcctccagtacttttaattgttatcacacgatttgctgcatcatatgtaacattcatatcattaacatcaacgcctgaattgttacttggaaaatctttagtcaatgaattgttcacatattcaacaccttcaggtaattgaacttgatatacaaagtcatttgtatctagagaagcaccagaattaccattattctttaatgatgttgttacagtaaactctttattatttgttgctgttggatccattgttcgtctttcaacaaaaacatgtgacccagaatgaagtccgatagagtcaacaaagctatagtatttgtaaccatcttttagttgataaatgccacgcgcatctgttattgcgtcatttttaggtacaaattgaattttgagatttctcacattatcaggtactttaaataaacgcaaagttggaccgccttcaacagtcttttcagcaatcgtatcattagtatcagcatttttgataataacatttgttgcgccttgaccgtttttagtagtcattgtattaaattcaaagattaattcagaattcggatttactgttaatgctttctcgataccattaaaatcgccatggtcattcgtatcagttccatgtatacgacctaatgcaattacatttccttgtgcttgatagttcttattatctcctgaatcaaacatgctcgttcttaccattgcatgactaaacacccctactttgccaccattgattagtgtgaagcccggcaagttattaacaacgtttactgttggcacagaacggttggtacttggtctaataccattgtcatcaaatgacagcacttcgttaggtgcattttgtcctgcattattggcattaggatcagttgttggcgtatatggcgctgtaattgcaactggtgcaccaccgtttcctaccgctgcagccgctggatctgctggagttgcattaggatctgccggtgccgcacgtctacttctctttttcggtctattagatgctggttcagcaattgcaactagctctggtttatttgaagaatgacgaacatcttcttgaatttcctttaaagttagatgtcctcctgaaccattttcatttgttttagttggtacatttaatgcggtattattcgacactacatcattattattagcgtttgacactgtctcagttgctgttgtattgccatctgtatgattattgttttgtgctgaaggcgtacttgattgcactgatgttggcgtagcttgatttactatactaccattattatgattaaccaatgcttgattcgttgcttgattggttgttgcagattgattaggtgtattctgcgcactatttgctaaacctctattattagcaacatctttatcttgtgaatttacaggtgttgcttgattagtatcgctttgtacattattatccgtagttaaggcttgtgcaccatttgggtttgaaagtaataaaactgttccgattaaagtagagaatatgcctactttatacttcctaatactatatttatttttctttaacaaattcatttcattttcctcctggttgtctgttctctgctgtgttgttaagaattatgctaaaaatatacgctccctcatattatatttatagctatattatatttatagctatattattttgtacaatattttaagttcactcaattttatcatcatcattttataaaataaagttttattttattacaatttagtttccgttttgtaattaaaatcttaataaaacataacaagaacgctttagattgttttgtaacagaaagtaattcataccaaaaaacaccaagcaaccgaaacgttacttggtgtcattacaaatgtaatattattttaaattatgtcactactttaaatactttttatttccaaaccttcatcgccccatgcgtgcatgccgccttcgacatttacggcatcaatgccatttgcctctaaatattctacaactttagcgcttcgaactccaccagcacatacaatataatatatttcatttttattaaatgaatttaaattatccggaatggtatccattggaattaactttgcattaggaatatatcccattgctgtttcttcatcagtacgaacatcaacaatttgaactggtttagattctaaaagtttattttttaattcatctgtagtaattgacttcatttcaaagtcctccttaaaacattatttagctacaatattgactaatttttgaggaacagcgatgactttcatgatgtctttaccttcaatactcgctttaacattgtcattagataaggcaatttcttgcatttcttcttttgatgtatctttagcaattttaattttagctctcaatttaccattcacttgaacaacgatttctacttcatcatctacaagtagtgcttcgtcataagttggccaaggttggtacgtaatagactcttcatgtcctaattttgaccataattcttcaccgatatgtggtgcaataggtgctaacattttaacgaagccttcaatgtaaggtttataaacttcatcaactttataacactcattaataaataccattaattgactaatagcagtattaaatcctaatgtttcaaagtcttctgttacctttttaacagtttggttataaactttatctaaagatttattatttgtagttacaatttttgaactcaatgtcccatcttcatttaccattaaacgccatacgcgatctaagaatcgacgagacccatctaatcctttttcactccatgcaattgcagcatctaaaggtcccataaacatttcgtaaagacgcaaagtatctgcaccatgagactgtactatatcatcaggattgattacatttcctttagatttactcatcttctcattaccttctcctaaaatcataccttggttaaataatttttggaaaggttctttagtaggtacgatagccaaatcataaaggactttatgccaaaatcttgcatataataagtgaagaaccgcatgttctactccaccgatatataaatcaacaggtaaccaatgttttaatttttcaggatctgctaacatattttcatttttaggatcgatgtaacgtaaataataccaacaactacctgcccattgtggcattgtatttgtttcacgacgtcctttcatacctgttttttcatctacaacatttacaaatgaatcaatattagctagtggagactcaccagtccctgatggcttgatttcatctgtttcaggtaacaacaatggtagctcttcttcaggaacagttgtcattgttccatcttcccaatgaatgacaggaattggttcgccccaataacgctgacgactgaataaccaatctcttaatttgtaattaactttcttttcgccagcacctttttgctctaataattgaatagctttagtaattgccgcttcattttctaaaccatcaagttcaccagaattaatatgtttaccttcaccagtgtatgctgcttcttcaacatttccaccttcgatgacttcaatgattggcaaatcaaactttttagcaaattcataatctctgtcatcatgcgctggtactgccataattgctccagtaccatatgttgataatacataatcagcaatccaaatttgtactttttcaccagataaaggattagttgcatatgcaccagtaaatacacctgatttatcttttgctaaatctgtacgttctaaatctgactttttagaagcttctgtttgataagcttttactttttctttatattcatctgttgtaattgaattaactaatgcatgttcaggacttaagactaagaatgatgcaccatagattgtatctggtctagtcgtaaatacttctacttttccttccgtattatctacatcaaatgaaactttggccccttcagaacgtccaatccaattgcgctgcatatcttttaaagactcaggccaatctaaatcatctaaatctgctaataattgatctgcatattctgtgattttaagtacccattgtttcatcggcttacgataaactggatgtccaccacgttcagagacaccatcaatcacttcttcgttagataaaacagtgcctaatgctggacaccagttaactgcaacttcatcaacgtatgctaaacctttgttatataactgtatgaaaatccactgtgtccatttatagtattctggatctgttgtattaacttcacgatcccaatcataactgaaccctaattctttaatttgtcgtttaaaagtttggatatttttctttgtaaattcacgtgggtcgttgccagtgtctaaagcatattgctctgctggtaatccgaatgcatcccaccccatcggatgtaatacattatatccttgcattcttttatatcttgaaatgatatctgttgctgtatagccctcaggatgtccaacatgtaaaccagcacctgatggatatggaaacatgtctaaagcataaaatttcttttgacctaagttatcatttgttttaaatgttttattttcgtcccaatagtcttgccatttcttttcaatttgattgtggttgtaattcaacacatttcctcctattcaataaaaaagacacctctaactattctatttacatagggacgacatttgccgcgttaccaccctatttcacaaaaattgtgcactcattttaatagtaagagatgtcattcattcaatttaaaattaatacgatttacatttagtccttaacactagctctcagcatcactagctttctgtagaaaagctccaaacgaaattaaattatacaaattaatattatgttataacgacatttatttcaagtctataacgttaattctatttactcattatgcatctatttttttaggttgcgtattattctccttgaaaaccattaataatattaatgcaaatacaagtagtagcatcataccgataaacatcatgcgcatattaaacgcatcaactaatacaccaccaagaaatggaccaaatgcttttcctactgtagcagctgaattcacaaaaccttggtactgtccttgcttaccatctggcgctaactgattggctatagttggaactgctggccatacaaacatttctccaaaagttaaaataatcataccgacaacaaatattgtaaagttttcggcaaaactcgtgacaaagaacgacaacataaaaatgatgatgccgacaaacatttgcttctttaagtttccttttaacagatagagaatcggtttaattaatggttgtgctactaaaatcattattccgttaattgtccataaaacactatattgtgccattgaaatattaatagattgtgtaaatgaagcgattgtagactcccattgaatatatgcaacccaacaaattgcaaacattgcacaaattagtactaatgaaataaatcttgctttattctttttaccagtaatatctaaatgagttggatatttaactttcgcattaatttcaatattaaattgcgttaccgcgacaagcgcaaacacaacatacataataagattggctaaaaagatatagttaaagctaaattctgcgacaaagccgcccattgcagcaccgacagccacaccaatattttgcgctaagtatatcgcattaaacgtttgtcttccgccatttggccacactgctccagccatagcgtatatcgcaggaataatcattccgccaccaaaccctaacattacaagccatacagcataccaaggccacccgtgaaagaaattaagtagcgttgtactacaaagacaagtgaaagttccaattaaaatcgtcttgtatccacctaatttatcaaatagtgaaccacctaataagtttccaataaccatgccaaatgaatttatcattagcactaaaccagcaacagttaaactttttccaagttcttgtttcatataaattgtatttaaaggccacaaaaaactggaaccagtaatatttaacgccatgccaattactagccaccagactgatttaggtatattcatatttcatagttcctctctcttttttgtcaaactataataaacactataacattaaaatatgttaaaatctgtacttagaactctttttttatagaaaggaaaatgacatatgggcaatcatttccaatacgcttttgaaaacaaacgttatcacacatggaattaccatttaaaaaataaatttggacaaaaaatatttaaagttgcattggatggcgggtttgactgtcctaaccgcgatggcactgtagcacatggtggatgtacattttgttctgctgcaggtagcggagactttgcaggtaatcgtgcagattcaatcgcagtacaatttaaagaaattaaagaaaagatgcatgagaaatggcacgaaggaaaatatattgcttattttcaggcatttacaaatacacatgcaccggttgaagtattaaaagaaaaattcgaacctgtacttaaagaaccgggtgttgtgggattatctattggtacgcgtcctgactgtctaccagacgatgttgtcgaatatttagcagatttgaatcaacgaacatacttatgggttgaattaggactacaaacaatccatcagtcaacatctgatttaatcaatcgtgcccatgatatgaaaacttattatgatggtgtggcaaaattacgtaagcataatatcaatgtatgtacacacatcattaatggcttacctggcgaagactatgacatgatgatggctactgccaaagaagttgcacaaatggatgtacaaggtattaaaattcatttacttcatttgttaaaaggtacaccgatggtaaaacaatacgataaaggtttattaacttttatgactcaagaagagtacacaaacctagttgtggaccaattagaagtgattccccctgaaatgatcgttcaccgaattaccggtgatggtccaatagatatcatggtaggtccaatgtggagtgttaataaatgggaagtattaaatggcatcgatgctgaattagcacgtagaaattcttatcaaggcttgcgttacaagtctaaggtgaagcaatgaaattagaacgtatactccctttttcaaaaacacttattaaacaacatataacaccagaaagtattgttgtagacgcaacttgcggtaacggcaatgacactttatttttagccgaacaagtaccagaaggacatgtttatggtttcgacattcaagatttagctttggaaaatacacgtgataaagttaaggatttcaatcatgtttctttaataaaagatggacatgaaaatattgaacatcatataaatgatgcacataaaggtcatattgatgcagccatctttaacctaggttatttgcctaaaggtgataaatctatcgtgacaaagcctgacacgacaatccaagctattaattcattgctatcattaatgtcaattgaaggtattattgtacttgttatatatcatggtcatagcgaaggacaaattgagaagcatgcattgcttgattacttgagtactttggatcaaaagcatgcgcaagttttgcaatatcaatttttaaaccaacgtaatcatgctccattcatttgtgccatagaaaaaatttcttaagcatttgctgcgctatactatttataatttaggattgagtagtcaacatttgaaaaattaatgccaacaacaaaaagaggttttcaacttaatgaaaacctctttttatgctattaaacttacacagcaataattgcgtttaaactattttgcattgctgttgctctacttgcaatcgcatcactgatgaaattcaacaactctactttctcttgttgtaacttttcattgaaatgaataataactgttctttcatcgtcaacaggacgctctttgtaaatccattctaattcaactaaattattatacgttctcgtacgcttatacggtttaacttcaacaaatctgtccatttctttaagcgtcatagaacctttttgccataaagttagtaaaattaaaatttcttctctagacattttgtattcgctttcaatctcgctgaaaattgagttaatgtcacccaaaagtgtttctaattgcaaaattccaaatacagtgtcgttatttacttttttcatgctaaacatctcccaattaataatcacatatttagctactatacaagtattaacaaacatcccaacaatcccaaaacttgtatgtgctaacttatgcataaaactacaagtgtaaataaacttgctttctattcaattgtcaaagttgaataaaattaaataagtataaaaaccaataatcaatagagttaatatttagaaataagataatagtacataaaacaaatcactctattacatattaattttataatttatatacaaagaaaatatatcaatattaccattaaattgcaacaattctacatatatttcttcaaaaaagatacgcattgaatttttattacatataactctcatgaaaattgattaaactaaattaattagttagccttaaatttaacaaattaaatcaaaccgaatgaggctaaattggttatttttcaagatatgatttgtataaatcaaaacatttcttacaaatcaaatgtgtataaaatgtgatatacattttcaaccttaaaaaagttctaaaaaaagatgagcatctactgtctcatctttcagttcttttttacgggtctgttttctaatttgagcacaatcttcgatttctttatctaaatgactaccaattaaatctatttcttctattgttaaatcgctatctccatcttcttttatctctggtattattttttcttcaactaagtcacgatatagtgtttttgaattctcgttcaatttcgattcgtgattttgaatactttcttccgcaccaatgtatatctattggcactagcttctacttttgtaccatcaataaaaattgaattatcatcaataagattttgctttaaacattgactatagaactgaataaataaagattcaattaacgcatcagtattaggattcactctaaaacgattaatagttttataagaaagtgtttgatcttgggctaaccacatcattcgaatactgtcatgaagtaatttctctattctacgaccagaaaatacagattgagtatatgcatataagatgatttttaacatcatttttggatgataggatgttgcaccacgatgatgtctgaattcatcgaattcgctatcaggtatcgtttcaacaatttcattaacatatcgcgaaatatcattttgaggaattctaacgaagtttctattggtagtgtaagttggggtcatgttataatttttatacataaggcacctctttaatttagtttagtagtatttattaaattatacgaagggacccaacacagaaaattcattttattgaattttacatttatgtgcaagttgggaaaaatgtcttattttttcaaagtatttaaaagtaaaattacatgttaatacgtagtattaatggcgagactcctgagggagcagtgccagtcgaagaccgaggctgagacggcaccctaggaaagcgaagccattcaatacgaagtattgtataaatagagaacagcagtaagatattttctaattgaaaattatcttactgctgttttttagggatttatgtcccaacctttttagaatattaaatttctacaatttcgtcatcttcaacaataaagcccattgtattgacgctgttatttaagaaagtcagaatataacgcattacttcatcacgttctggctcattgtgaacctcgtggtaaaaaccttgccaagctttaaaatataattcaggtgtttgatatttttctttaaactcatcaattgccctagtatcaacaattaaatccttcgttccatacattaatagcgttggcattggttgaatgtcatgaatatgagccatcgtatctttcatcgtctcattaattgtattataccaatgatacgttgctttttttaacattaaaccatcgttaactgtttcttcaacaatttctaaattacgtgttaaatcttttggttctacaccaacattaaaacgtgtgtcttttgaaattttacctatatttgaaacaagtttatctttacgattttttccattcttttgaagttctagcataggagaaattaacatcatcccctcgattggcaattctactttttcaagtaaatttaataaaatcaaaccgccaagtcctacccctaatacataagtaggaattttatattcattagctatctttaaccagtctagcaaactttcgtgatacgtttgaaagttttcaatttgtcctttattagctcttgaagtttgaccttgaccaggcaaatctcccataatcacatgatagccatttcttcttaacatcgtaataacatatgcatatcttcccgtatgttctaatatattatgagcaataacaacgacgcctttcgcatcattttcagcttcccacttccacattattatactgcccctttttcattaatcttcaataacataattatagcaaattcactatgtagatttctatttatagtattattgttgtccatattattatatataaatgaaatcaacatcaataatagtgtaattatacataattatttttgattgtttttgatgaaaacgctttctcgaatatttttttcatgctaaacttattgtaaacacaagggtttggaggagtagcaatggcactattaaagaatttttttatcggattatctaataatagttttttaaacaacgcagcaaaaaaagtgggcccacgtttgggcgccaataaagtcgttgccggaaatacaattccagagttaattaatacaatcgaatacttaaatgacaagaatatcgctgttacggtagacaatttaggggaatttgtcggtacagttgaagaaagtaatcatgctaaagaacaaattttaacaattatggacgcgcttcatcaacatggcgtaaaggcacatatgtctgttaaattgagtcagttaggtgcagaattcgacttagaattagcttaccaaaatttaagagagattttacttaaagcaaatacttacaacaatatgcatataaatattgatactgaaaaatatgctagcctgcaacaaattgttcaagttttagatcgcttaaaaggcgaatttagaaatgttggtactgtaattcaagcatatttatacgatagccacgaattagttgataagtaccaagatttacgattacgtttggttaaaggtgcatataaagaaaacgaatcaattgcatttcaatctaaggaagacgtagatgcaaattacatcaaaataattgaacaacgtttgttaaacgcacgcaatttcacttcaattgcaacacatgaccatcgcatcattaatcatgtaaaacaatttatgaaagaaaatcacattgaaaaagatcgtatggaattccaaatgctctatggttttagatcagagttagcagaagaaatcgcaaatgaaggctataatttcactatttatgtaccttatggcgatgattggtttgcgtattttatgagaagattagcagaacgcccacaaaacctatctcttgctgtaaaagaatttgtgaaacctgctggcttaaaacgtgttggcataattgcagctttaggagctacagttatgttaggtttaagtacaattaaaaaattatgccgtaaatagagcaagacataaacaataatttaggagtctggaacaataatcaatgttctaggctcctaaatgttatattggcagttctgaaacatttataaatctttgattatgaactcacaacagtgctctatgcttttatagattttaataaattagccatttcaattgcacttactgctgcttcagcacctttattgccagctttcgtacctgctctttccacagcttgttcaatactttcagtcgttaaaataccaaatatgactggtacattagtttgatcattcactttagaaacacctttcgcgacttcattacaaacataatcataatgagacgtagcaccgcgaattacgcatcctaatgtaattactgcatcataatttcctgatgaggctaattttttagctactaaaggaatttcaaacgcacctggcacaaatgctacatcaatattgtcttcattaacatcatgtcgaatcaaagtatcttttgcaccttcaagtaatcttccagtgataaaatcattaaatcgactaactacgattgcaactttcaaatcttttccaattaatttaccttcaaaattcatgttaaaatcctcctatattaaatgacccatttttatttttttcgtttccatataatcatgattatgtaccgtttctggtacgataacttcaattctttctgcaatatcaatgccatattgttttaatccctcaaatttacttggattattacttaataaattgatatgttcgatgttaaaatattttaaaatctgtgcagcaatatgataatctcgcaaatcttcatcaaaacctaatgctaaatttgcagttactgtatcatatccttgctcaattaattcatatgcgcgtaatttgtttaacaatcctatgccacgaccttcttgaggtagataaataatcatgccaccatgttcattgatatacttcatagacgattcaagttgagcaccacaatcacaacgttgactatggaaaatatcgcctgtaaggcacgcagaatgtaagcgtacattttcatgttgtcgaattgcaccttttgtcagtacaactatctcttcatctgtgtatgtcgctttaaaaccatacatatcaaatgttccgaaatctgtaggcattttcacttttgccttaaattcaatttctggttctaattttttacgatattcaattaaatcatcaatcgtaatcatctttaattgatgtttttctttaaacttttgtaaatcttgtcctttcgccatcgtgccgtcatcattcataatctcacaaatgacaccagcgggcttggcaccagtaagtttagctaaatcaacagccgcttctgtgtgtccatttctagctaatacgcctttatcttgtgctactaatggaaataaatgaccaggacgattaaaatctttagcttcactactaggatcaatgagctttttggcagtcaatgtacgttcataagcactaattcctgttgttgtatctacatgatcaatactcactgtaaattgcgtaccaaagatgtcggagttatcatcaaccatttgtaccaaatccaaacgttgtgcaatatctttagacactggtgcgcatattaatccccttgcttctttcgccataaaattaatggtattatcgttcatccattcagtaaccgctactaaatcaccttcattttcacgattctcatcatctactacaataattggttctccattttttaaagccattaaagcactgtcaatattatcgaattgcatgctacccctcctaaaaaccaaatgctcttaatttatctacagataattggtctttatctttatttaaaatattttcaacatatttaaacaaaacgtctgtttctaaatgtactttatctcctaattttttggatgataaaatcgttgaacgcctcgtttctggaataagatgaatgtcaaaactgttatcatgcttatcaaataccgttagactaacaccatccacagtaatagacccttgcttaactaactgattattaatatgttggctacattgaatcgtaataatttttgcattggctgtttcatttatttttgaaactgttcctagttcatctacatgaccgaggacaaaatgtccaccaaacctaccgttaccactcatggcacgctctaaatttacttctgattgtcgcttaacatctgctaaataggttttattttcagtgcctttaattacttgaacagtaaaagatgtctgattaaaatcaatcactgttaaacatgcaccattaacactgatggaatcaccaatatgcatatctgccgtaatcttatgtgcttcaatttcaatcgtcctgactgattgacgaatttgaacacttttaacgacacctatttcttcaacgatgccagtaaacatgcatcatcacttctttcgtaaagttaatttaacattttgatttaataactcggaatgaacaatttcaaattggttcgcatctggtatctcaatcacatcatttgtttgataaaattgataatttccagatccgccaattaatttcggggcataatagagaataaattcatctatataattagattggagaaattctgaagtagtggttggacctgcctcgactagcaaagttccaactcctcttttatataaattgtgaagaattgttgttaaatcgcaagacttcaagtaaataatttcaatatgtgtttgattggttgttaaatttggattttcagtatatatccaaattggtgttgattcatcttgataaatttgctgattaaaatgaatattcccagacttagacaatattacttttatagggttttttccatcttgaatacgtgtagtatattgtggatcatctaattcaactgtacgtcttccagttaacactgcgtcgtgtcgatgtcttaacttatagacatcttgtttaacctctttgttagtaatccattgactttgtccattatcattcgcttgtttaccatctaaacttgcagatactttcactgtaatttgtggcagttgctttgcttttgctttaaaaaagtcttggtataattgtgatgcccgttcatcatcaacgcattcaacctcaataccgtgagcccgtaacgtctcatcaccatgtgtgtctaacgaattgtcttttgttgcgtatactacttttgctatcttacaatcaattattttgttaacacagggtggtgttgaaccaaaatgactacatggctctaacgtaatataaatcgtcgcaccttcagcattttgttgtgccatatcaagtgcttgaacctccgcatgcttgtcaccttttctcaagtgtgcaccaataccaacaatcctaccttctttaactacaacagcgccaacgggtggattaacacctgtttgaccttgtaccatatttgcaagttgaatcgcataatccataaattgactcaaatgatcacctctataaacaaaaatcctcacatcatgaattaagatgcaaggagaaaaatttatcgttaaataagcctatttgtacacatttttacaaatacgctacattatctttgtcgataattaacattctttctcccatccagactttaactgtcggctctagaatctcactagatcagccactaatatgaaacatattagcaggtcgcaggctttatttactgccggttgggaatttcaccctgccccgaaagaattatatatgaaattgttatagattatttgagtacgtagtatgtcaactacatttaaaatgatactatatgttttctgaaaaaacaattaatgacggttttaatttaatataatctgagtactataggcatctcattgatatgattcttactaacagacattaaaatcaaaccttcaattcgtctctatagagcgttctctttattatcttctagttacaaattattgattgtcactgcgctgttgttgctcattcgattctaaagcatcatataattgagatactgtatgcgcaacttgttctacaatcattttcacaccgtttcgtagtttattaacaccgtttgtcatttgacctatcgcaatcatatttgttaatgttccaaaccttggactaataacttgattggtttccggaatgatttgtatgcctcccattgggtgtgcttgtacaatttgtctattttcaagatttctaattaattgatcatcttgatccaattcatttaaatgactttttgcacctgtcgcgttaatgacaacattatatatgtctactgattcttggtttttgtatgaaaaataatacaacttgccatcatgtttcacatcttctaaatcttttttcaaaattaaagacttattttctattaattcaataattagttcagcagttcttggaggcattggatttgaatttaattgaatcatctttgagtatttttgattaaattgatgttggtcttcaatacttaagctattccatatccaatttaaattctctttcaaatgttcaatcatactttggaaaatgcccatttctgttggacgcgctaaatcatacttcaaatctgcaatatgatttcctgtacgtctatgtactaattttttaaaatcaatgtcatattcagcacattcttttaaaaataaagaaactaaagtatcaagcggtgcattgccgaaatgatgttttttaatgtcatttaatttgtctttagttaagtacttgaatgtcacgtctatcattgtacctcttacacttggtaaatgagcagaacgactcgtcatagtaattggtaattttggatgatgagcagcaacataacggacaacatctaaactggcaaggcctgtaccaataatcgcaatatcgtccagttcatttacttcgtctaacgtattatatgttggataaggcgtagcgatatatccttttttaccctttaagttatatggatcatggtaggcaaatgtaccacatgttaaaaatacataatcgtacgcttgccatgattgtcctgaatttgtagtacatatgtaataagttaaattcgtttcatcgatattagaatttgtataaatctcttgaactttattataattagttgatatatttggatattttttcgtgaacatagataaataagatttcatataatgtccgaatacaaatctcggtaaatatgcaggttcatcaaaattaaaatcagtttgttgtttataccacttccaaaattcagtctcatcatctaaatttaaactcatctttttcgaaggcatattaattagcagctcagaactatcattttgaaatggtacgccctgtcccatatttactttatcatcgtataaatctatatctaattgattaaacttcgggtgcttaactaactctctcaatacacttacaccagcagttcccatgcctattattgctacacgcatatatcatccatccttttgtaattcaaaatattatatttaaactattacctataattatagcaatttggtatttccaataaaatttattaaggtaagctattatttcactttcacaaccattaaaccatttaaaacttttcatttaatatcaaccttagtgtttgtgttaaaatatttttaacgaggtgaattaaattgaaatttatagcaaagatattaatctcattagtaattctatttatgatttttagtcgtaaaaacaaagcttcttaatcaatacccttgattacaaaataaattcaactaaggtgattggccatacactcaagatatggctaatcacctttttcaatgcagaacaaagagtatattttgcaaaatcaatatctataatttatctttaatacccttttaatactaaaaccaaatttaaattacatagtcatatcgtgtaatataccaaaggaacatagacattcatctatatagatgataatctatttaacgtctaggaggtatgttatgacgtataaagaactagcaacatttttaaaagttttatcagattcaagcagattagaaatactagatttactttcttgtggagagttatgcgcttgtgatttgttagcacattttcaattctctcaacctacacttagctatcatatgaaagcattagtaaaaaccaacttagttacgacacgaaaaatcggaaataaacatttataccagctcaatcataatatttttgagtccgtaattaataacttgtctaaggttcatacctctaaccaacgatgtatttgtcataaccttaagactggtgaatgctaatgatgacaactttagcgacactcatttttctagtaactttattatttgtattatggcaacctaaaggcctagatattggcattaccgcactaactggtgcctttattgctgttattactggtgttgtaagtttttccgatgttttcgaagtaacaggtattgtttggaatgctactttgacttttgtctcagtcattcttatttcattaatattagataaagttggattattcgaatggtcagctattcacatgcttcatgcttcaaaaggcaatggtttaaaaatgttcgtttatatcatattattgggtgccattgttgctgcatttttcgcaaatgatggcgcagcgttaatcttaacgcctattgtattagcgatggttaaaaatataggttttagtaagcgggccatattcccttttattattgcgagtggttttatagctgacacaacttctttacctttaatcgtgagcaatctagtgaatattatatctgctgattattttcatgtaggattcgttcgatattttagtagaatgattatacctaatttattctcgcttttagcaagtattatagtattgtggttatattttagaaaagcgatacctaaaacgtttgatgataataatataaagcatcctaaagatgccattaatgatttaaagctatttaaaatttcatggattgttctagttatattacttttcggctatctaatcagtaaatttactaaaattccggtatcaattttcactggaatcattgcttttatttttctaatgttggctcgtaaatcaaatgctgtaaatattaagcaagtcattaagggcgcaccttggaatatagtattattttcaattggtatgtatatcgtcgtattcggcttaagaaatgctggcattactttaatattggctaaaatattagaatatatttccaattacggtctatttagcactattttgggaatgggcttcatttcagcgtttttatcatcaataatgaataatatgcctacagttttaatagatgcgattgctattggtcaatcaaatgtccatggcatgttaaaagaaggcctaatttatgcgaatgttatcggttctgatttaggtccaaaaattacaccgataggctctttagctacattactgtggttacacgtcttaacacaaaaagatgttaagatttcttggggcacatactttaaaactggtatcatcattacaattccagtactatttataaccctcatagggttgtatctaacacttatcatattttaattaattaggagattgttatgactaaaaaaacaatttattttatatgtacaggcaactcatgtcgaagtcaaatggctgaaggttgggctaaacaaatcttagcggatgattggaatgtatattctgctggtatcgaaacacacggtgttaatcccaaagcgatagaagctatgaaagaagtaggcattgatatatcaaatcatacatcagatttaatcgataataatattattaaaaattcaaatttagttgttacattatgtagtgatgcagacgtaaattgcccttctttaccaacaaatgttaagaaagaacattggggatttgatgatcctgcaggcaagccttggtcagagttccaacgtgtaagagatgaaattaaaatcgcaattgaaaatttcaaatcacgatgagagtgggacagaaatgataaaaaaacactaatgatttattatgtagtggttctttatcattagctataactaatgtgtacttaaaaataggaatacatgagtaaaactcatgcataagaaatactaatttctaaagaaaaagtaattctttatcgatgtcctgccccacttgcattggtgggattatcaatcaatgtgttttctctaatgcaaaaagacgctttctatcaaaacaagatagaaagcgtctttttagtatgtccgagtcataaaaacaactcgtagcttatcaaattacttattcaaatgtttactgtcatctttatacacaaagtatttgaagtattttccttcagtcttcatgttcttataaaagtcagcgataattgttgcattactttctgcccacttaatatctgtagcatattgatgttctcctggattttttggattccatctcatactatacaatgtattttgatctgtgcttgataagaagtgcttatgaatgaaatcagcaccgcctgaaatagctttttcaggtgtatcccaaccatgctttttagcatattctgcacctgttttaattgggtctttatcaagggctcctactccatagaaattgtagtactttttgccatcaatttcgactccattagctaattcacttttaactgcgccagtttctaataatgcatgtgaaattaaataaacttcgttaacgtgcttatctttagcagcttttaagaaatcatccgtatgtttcaataacgttggtctatctactaacatacgtttaattctatttttatcaatcccttgatactttgataaatctaaaaattgatatttttgcttttcattatcgataaaagtaccgctatccattgcacttttaatttcagttgcagatgcatctctccatgcatcattctttttatttgatacctgttgactcgtataattatttatttgtttctttgctgcatcgtttaatgtaacatttaacttttcaatcttaatgtcggatttaacatgtttgaaaaatatctgatcggatatcattgagaaaaataaaaatgagacaacagcaaatatgacaacaagtcctattattccaaaaatagaacctttcttgtgtttattcatatccacacctcttaggtcattgttgttatacattcagtttgactacgataataaagtttaacattattaaaaccgtttaacaattttatctatgcattgttacatattcataaataaacagtaatgtaaatgaaacgttttaaaccatttatcaacattactttacgttgatctacgaatcataaatgttttatctttttgtataacctttgaaaacctttatatcaataatcttattattcacgtattaaaaaacaaaaaattcttttgttcgtttacttagtttcttttttataatccatcataataaaacttgctgcatttgatctatttttataatagtactgatttaaatcaatcgtgccttcaatttgaccatcacgatacatcatttcattagtgaagttatttatcatcacgaaatcagcgcgatctcttataacatctaaatcgtcgtttcgtgcaaaaaaatgttctaaatttaaatgtgcgtaatccattgttacctcccgattacaaattttgttctatctactatttagcaaagtaataatacatcatatcacattaaattaattacttatgtcttatatttaacacttaatttagcgattacgcaaatgaatgatttttctaaatattttattctaactttatccggaaatatttgttatacgtataacttggagaatgactacttgaaatttaatgacgtatacaacaaacaccagaaaatcatacactatcttttaaaaaaatataatattagctataattatgatgagtattatcaactactcttgataaaaatgtggcaattgagtcagatatataaaccctcaagcaagcaatctttatcctcttttttattcactcgattaaatttttaccttatcgatttattcagacaacaaaatcaattaaaagatgtcattttatgtgagaataattcaccaacattaactgaacaaccaacatactttaatgaacatgaccttcgtttacaagatatcttcaagcttttaaatcaaagagaaagactatggctcaaactataccttgaaggatacaagcaatttgaaattgctgaaatcatgtcattatcgctttcaacgattaaattaattaagatgtccgttaagcgtaaatgccaacataattttaattagtttattgtgaaatttcggtcgatgtgttaatgatgttgaaacaccctaacatcttcatataaatttattttaaccattaaattaacaacttattaaacgaggagtactatatttgcaagacaattctactaaatatctactttatatccaaactgctacttcaaaccatctcgaaacaaattgtgtctttttacattgcgattacattcttaaagttccaattaacaaactcgtttcatattatgcgaaattgcatttatcatcacaaagtgtgctaattgagactgcaaaaaacatactaaatattaataaactggttcctatttacatcaacccaaaaactatactttttccgttaaaacataaacgtgcaccgatacaaatttatatcaatgcacattatattgttggtatgactgccatagagaattcaacattaatacattttcaagaaggcattcagctagaagttgatgagccattttctctagtttcaaaaaaatgtcatgaaagtttagctttgaagcacttcattgaaaatactatttcgaattaaatttaatttctaaaagtttcttagtaaagtatgatgtcacaatttttataaaatatatgctagcaaacattaataaaatcgctccaataattgttaaaataacaacagttgtagataaatctaccttaggactaacgaaaaattgtacgccagatagacttgtaattagcccaaataaaaacaaacctaataaagcaacataagcaaacatcatcactactaatgtaacaaacatactataactttttgtttctttatttcgaaatacattttgtcttaagtaagcattagcaaaggtaacaggcttatttaagttaacgctgtcatcatcagatatagaagacaatcgttgatctaatgcttgtttctccttcttgttcaaaaaccataattgctttttaacttttttatcaaatgatgctttattcataattaaggatttctctcctttataatattgacgtaattttaaacattagcgtcaattgaaagtgtattttatatattttacagaaatatatgtatcaaatctacaaaaatccatattacaatttcatttatggtgatttgacgctaaaatacagtctgctaatttttcaaactaatgctttttaggtaggtacaatgataaattttaatcgtaaatatgtttcatatattatgaatctagccttaatcatattgcattcaaaataattttaaaaaatgaaaagaaaggatttagcatgcaaaaattcaaagactttttttacgatgatttatcggttacacgaggaaattattttttaactttaatggcagcattttttattactatcattttatttatcggcatagttgtcagtgaagtacatttactttatagcatgctaattgtattagtaggtttaattctattgaggctattcaaaatcaatttattctcttttaaaaaattaacattgtctcaagttatttatattataggcggtgcactattaatttatgggttagataatctttatttatattttcatgacgtaccggcaaatgaacaacaattagagcaagcaatacgaaatacaccattctatatttctattttcactgttaccatcatccccgctattgtggaagaaattgtttttcgcggtatgataataagggttatcttcagaaaacacttgtttttagggttaattgtgtctagtttagtttttgcatcattacacgaatctgacacttggattggttatttaccttacttatattctggtttgatttttggcctaatttatataaaaacaaaacgattagaagttgtaatattcatgcacttcttaaataacttgttagctctgctctttataatatggagataattttgagataacctttcatattattttcaaattatctatctgatatttattttattgaacttgagtcaccacttaaactcaaaaatacgtgtcatcaagtgcaaaataatttagaactaatacaaacataaaaacttttactttacgcttaaaatcaaaagtcacatacctagatataagtacaacttgtatattttgtactctaataggtatgtggcttaaataatatttaattcttgagttgcatatagtaactgtttttattcattttctaaaatatgcaagactaatttccttttctactcctgttgaatcaatttagacttttttataactcgagcttttacttagctgaattttgacttcttcttcattaataactatgatggaaaaacccccataagcacaatgcctatgagggtttaaatatatttatatattatagaatagaaagacctgaagattgaatatctttcgcaaagcctttaactgtatctactgataattcgttaatatcgcgacctaagtttgtattcacttttttcacaacatctgctgggcatgtaataatatctgcaccaatttcatcagcttgaatcacattgaataattcgcggcaacttgcccataataatttaacgccgtctttactatgcgtaacttttacagcctctttcattaatggtaatggatctacgcctgtatctgcaatacgtcctgcaaatactgaaacatatgttggcacaccttcagttactgcttcagttatttctttaacttgttcaattgtgtaaacagccgtaacgtttaatctcacattgtcagctgaaagttttttaattaaaggaatcgttgattcaccttttgtatttacaataggaattttaacaaatacattttcgccatattgttttaaaattgctgcttctttttccatagtttctaaatcgtctgcaaatacttcaaatgaaattgaagcatctggaatttctttcacagcttcttcagcaaaagctttgtaatctgttacgcccgctttagccattaaactaggatttgttgtaaaaccatccacttgtttgtttttataagctgctttcatttcttcaatatctgcaccgtccgcaaatacttctacatttagtttagccatataatatagcctccttgattcttattaaaattttaacaacatctgcatgtctttttcttacaaccatttgtaaaaaatgatttttatttctttgttatataaaacatttatatcacgcttttataatatatagctaattttttgcctatattttttaaaaatgactttagcaaacattgtgtctacaagttaataaaactattgttttatgattgtttatgatacgatatgtaaatgataatcatccaggaggtctagcatgtctcgttcaaaaaaatacttttacttatctagcttaatgattattttaagctttttctttaatacaaataacgttttcctaagtggactttttaattcttttattaaattaatacttttctgcagtgttattaactcaattgtactaattttgtctataatttttgcagatcgttcaattaaatcactaaagcctgatgcagattggattagaattgcgagtaaaagtttgccttggattattctaattgttattttagtacatatcttttcaattgttcgtacattcggttttatttaaaaaagttaatatgtcattgtagccttaatacaaaacaatacaatgtatcatgctataatgagtaaaacaatttgataacgttgttgcgtataaaaaatattagattttcgaaatcataactatgcatctaatcgctatagttatacaacaagatataacatataatgaggtttgataatgcatcgacaatttttgtcgtcgcgttgccaaaacctcttttttaaattcaaactacttcttttcgaggtgaaccaaatgcaatatgtatatatttttatcggtggtgctttaggcgctttattacgttacctcatttcttttctgaatactgacggaggttttccaatcggaacactgatagccaatttgactggtgcctttgtaatgggattgctaacagccttaacaattgcatttttttcaaaccatccgaccctaaaaaaagctattacgactggttttcttggtgctttaacgactttttcaacatttcaattagaattaatacatatgtttgatcatcaacaatttataactttactactatatgctgtaacaagttatgtctttggtattttgttatgttacgtcggtataaaactaggtggtggtttatcatgatatcaatcattttagtcatgattggcggcggttttggcgcaattgctagaagtgccattactgattattttaatcataaatttacttcaaagttacctatcgcaacattgatagtaaatctagttggtagttttttaattggattaactataggcttatcaatttcaatctcatggttccctgcgttctttgttaccggttttttaggtggcttaacaactttctcaacgttagccaaagaacttacactaatgatgacgccaaaatttaatattaacctttttctcaattattcacttttacaattcatcattggatttatagcttgttatattggctatcatatttaaaaataaaatgcttcattcagcaaataggtaaattacgacaccttcctgaacgaagcattttttaattttcatgcaaatttttaagcaccatataatgcctaccaaatttcaataatctttgttgccgtttaaataatgtgaatgtcaataaattctccaaactagtcgaaaataaagggagtgggacataaatccctaaaaaaacagcagtaagataattttcaattagaaaatatcttactgctgttctctatttatacaatacttcgtattgaatggcttcgctttcctagggtgccgtctcagcctcggtcttcgactggcactgctccctcaggagtctcgccattaatactacgtattaacatgtaattttacttttacatactttaaaaaataagacactttgcccaacttacactaccaatagaaacctctgttagaattcctcaaaatgatatttcgcgatatgttaatgaaattgttgaaacgatacctgatagcgaattcgatgaattcagacatcatcgtggcgcaacatcctatcatccaaaaatgatgttaaaaatcatcttatatgcatatactcaatctgtattttctggtcgaagaatagagaaattacttcatgacagtattcgaatgatgtggttagctcaaaatcaaacaccttcttataaaactattaatcgttttagagtgaatcctaatactgatgcgttaattgaatctttatttattcagttccatagtcaatgtttaaagcaaaatcttattgataataattcaatttttattgatggtacaaaagtagaagctaatgccaatagatatacatttgtgtggaagaaaagtattcaaaatcacgaatcgaaattgaacgaaaattcaaaagcattatatcgtgacttagttgaagaaaaaataataccagagataaaagaagatggagatagcgatttaacaatagaagaaatagatttaattggtagtcatttagataaagaaatcgaagatttaaatcattctattgagaacgaagattgtgctcaaattagaaaacagacccgtaaaaaaagaactgagattaagaagttcaaaaagaaatttgatgattattccgaaagaaaaaataaatatgaagaacaaaaatcgattcttaaagatagaaatagtttttctaaaactgatcatgatgcaacttttatgagaatgaaggaagaccatatgaaaaatggccaacttaagccaggatacaatttacaaatagcgacaaattctcaatttgttttatcctatgacctatttcaaaacccgacagatactagaactttaattccatttttaacaatgattcaaaataccttcggttatttgtagctgatgcaggttatggtagtgagcaaaactatatggccattatagatgattttaataaaacgccacttattacgtatggcatgtttattaaagataaaactagaaagtttaaaagtgacattttcgacactcaaaattggaaatatgacgaacttaatgatgaatttatatgtcctaataacaaaagaataggttttaaaagatatgcataccgtaatgatagatatggttttaaacgagacttcaaactatatgaatgcgatgactgttcagcatgttctttgaggcaacaatgcatgaaaccaaattcaaaatccaataagaaaatcatgaagaattataattgggaatactttaaagtccaaattaatcaaaagctttctgaaccagaaacgaaaaaaatctatagtcaaagaaaaattgatgtagagcctgtttttggatttatgaaggctattttgggtttaactcgaacgtcagttcgaggaataaataaagttaaacgagagctaggttttgtattaatggcacttaatataaggaaaatagcagctcaacgagctgtacattataaaatacatatcaaaaaagctgatttctatcaaataattaatagaaatcagcttttttacattgcctaagaacttaatgtcccaagccctgacaattcatctaaccttttcatcagttgagcgattttaatctagccttcaaatttttttggatcaggtccaattctcttatcttgatttaaaccatcaattcgcgtcatttgttcatctgataattcgaaatcaaatatttggaaattttcagagattctgtttggtgtcaccgatttagggattgtaaccacagcatgctgcacattccatcttaaaacaacttgggcaggtgactttcctaattcttgagcaatgtctttaattgtctcatcatttaaaatttgtgcattcatcaatggtgaccaagattccatcacgatacgttgtgctgccaaatataatttcaatttatgttgggttaaatatggatgatattcaacttgattaattacaggtttaattgacacttgtgccaacaaagcttccaaatgttcaggttcaaaattgctgacacctatatttttaacattattatttttatataaatcttccatacctttccatgtatcaaccattacggcttcgttcgtacctggccaatgtactagatacaaatctaagtattttaaacctaatctagataaactagcttcgtaagcagctgctacattttcacgaccgaaatcctcaaaatataattttgaagtaataaataagtcttctctagcaataccagttgactccaatccggcacgaatgccagcacctacttgttcttcattcccataaacttttgcggtatcaatactacgatatccttgttcaatggcatacttaacactttccatgcaattttcatcattttccacacgaaatgtccctaaaccaatttgtggcatcgtgtttccattataaaatgttttaacctccataaatatcgcctcacctttttgatgtattataccctgttatcataacaaatctgagttgaatacatgagaaaaaacacttagagcaatcaaccactaaaattctagtaatatctctcaaatattaatcaaattgtaaaagtaattctgtttaatttatgacaaactaaaaaagccgaagtaacaacatatagtcatcacttcagcctaacatttaattgaatgattcaattttatccatcatttgttgtaagtcttccacgttgtattgaatacgaccatggaatacaaatttgttaaagaactcgtctaattgttcagcaccgacaagcactttgacagcactattttgattataatttgaaatcgttacatcgccttcatttttaagattaaagtataaaattgaagttggtgtatatttggcacctaattctttttgtaagtcttcagccaattgtttaatcgcctcaatttgatctgaataatttacaaatgataatgaacgtttgtcatcattttgatccatcacaatagtttgcggtctagatttatctaaatccaatgtatcaaatacttgttccattggtggtaaatctttaaattgaccgccactaataccattataaacatgaccttttaacaattgagaatcaataatataaagaccagttcttgttaatactaaatgactaattcgttcaatattattaaagccatcctttggtaaaaagatatttgccataatgtgcatatcttctggtcgaattcgtttttctttaactaatctttcacgaataccaattaatctcatgtccgttacatattcactatgatttttcgagaacaattttaatgcgtcaatctcacgatcttttgtactaaccatgtgattataatcttcttgttgttttgtaattgtctttttattttgaatacgctctttctctaaagcttcttcatgagactttttaatgttttgttcttgttgttcatacttttcttctgtttgtcgcttaacttttttcttactacctaaggcaactaaaaaaaggacaaaaaagattaatgcaatgactactgcaataatgagtccaatgactatcggtgaagataaatccatcacaacaacgctcctttttaatatatgaataactttaattataatagaaaagctaaagattttcgatacatattatcatttatataccgaaaatcttttatttagctatattcaattcatcttattattttactgcgtcttttaattcttccactttgtctaatttttcccatgggaataagacatctgtacgtccaaaatgaccataagcagcagtttgtttgtaaatcggttgtttcaaatcaagcattttaataatacctgcaggtcttaggtcaaagtgttttctaactgcttcgacaagttgcccttcagaaactttacctgttccaaatgtatcaattgcaattgacactggttctgcaacaccaatcgcatatgccaattgtacttcacattgatctgctaaacctgctgcaacaatatttttagccacataacgtgcagcgtatgcagctgaacggtctacttttgtaggatccttaccactgaagcatccgccaccatgacgtgcatagccaccgtacgtatcaacaatgattttacgtcctgttaatcctgcatcaccttgaggtccaccgattacaaagcgtcctgtaggattgatgtagaatttagtttgttcattaatcaagttttctggaacagttggataaatgacatgtgctttaatgtcttcttgaatttgttcaagtgtcacatcctcagcatgttgtgttgatacgacaatcgtatcaatacgtactgggttatcattttcatcatattcaacagtgacctgaactttaccgtctggtcgtaaataatttaacgtaccatctttacgcacatctgataaacgttttgccaattgatgtgataaataaattgctagaggcatatacgtctctgtttcattcgttgcgtaaccaaacattaaaccttggtcacctgcacctgttgcttcaatttcttcttcgctatctttatcacgatactctaatgctttatccacgccttgtgcaatgtcaggtgattgttcatcaatcgcagttaaaattgccattgtttcataatcataaccatattttgctcttgtgtatccaatttctttaattgtttctctaacaactttcggaatatcaacatatgttgttgtagaaatttcgccggcgatcaatgccatacctgttgtaacagttgtttcacaagctacacgtgcatttggatcgtcttttaaaatagcatctaatattgcatctgacacttggtcagcgattttatctgggtgtccttctgtaacagactctgaagtaaataatcgtttgttatttaacatagtttgctcctttaaatttatattacgaaaattctctctctgtgagctaaataaaaaagaccttctaactattaatatagagagaaggcctaatacgtccattcgctcttatcgttcagacctatttgtctgcaaacggtttggcacctttcttttataaaaaagaggttgctgggtttcattgggtccatgtccctccaccactcaggataagagaatccgttaaaaataatagtacctaattaatgaattaatgtcaatttttcacaaataaatttacagtaaaatattgtagattaattatgttaatgtgttatactaattaaatgtaaaggcttacatttaaattatcgctttggagggatttaggatgtcagtagacacatacactgaaacaactaaaattgacaaattactgaaaaaaccaacgtcacattttcaactttcgacgacacaactttataataaaatcttagacaataacgaaggggtattaacagaacttggtgctgttaatgcaagtactggaaaatatactggtcgttcgcctaaagacaaattttttgtctctgaaccttcatatagagataacattgattggggagaaattaatcaacctatcgatgaagaaactttcttgaagttataccataaagtactagactatttagataaaaaagatgaactatacgtatttaaaggctacgctggtagcgataaagatacaatgttaaaacttacagtcatcaatgaattagcatggcataatttatttgctaaaaatatgtttattagacctgaatcaaaagaagaagctacaaagattaaacctaacttcactatcgtttctgcaccacattttaaagcagatccagaagttgatggtactaaatctgaaacctttgtcattatttcatttaaacacaaagtcattttaatcggcggtactgaatacgctggtgaaatgaaaaaaggtatcttctctgtaatgaattatctcttaccgatgcaagatattatgagcatgcattgctcagcaaacgttggtgaaaaaggcgatgttgcattattctttggtctatctggcactggtaaaacaaccttatcggctgacccacaccgtaaactaatcggtgatgatgaacacggctggaataaaaacggggtctttaatatcgaaggtggctgctatgcaaaagcaattaatctttccaaagaaaaagaaccacagatttttgacgcaatcaaatatggtgcaattttagagaacactgtagttgcagaagatggttcagtggactttgaagacaatcgttatacagaaaacacgcgtgccgcttatccaattaatcacattgacaatattgtagtaccatctaaagcagcacatccaaatacaattattttcttaactgcggatgcatttggtgttattccaccgatttcaaagttaaataaagaccaagcaatgtatcatttcttgagtggtttcacttctaaattagctggtacagagcgtggtgtgacagaacctgaaccatcattctcaacatgtttcggagcaccgttcttcccgttacaccctactgtttacgctgatctattaggtgaacttatcgatttacatgatgttgatgtttatcttgttaatactggatggactggcggaaaatatggtgtaggacgtagaatcagcttacattacacacgtcaaatggtaaaccaagcgatttctggcaaattgaaaaatgcagaatatacaaaagatagtacgtttggtttaagcattcctgtagaaattgaagatgtaccgaaaacaattttaaatccaattaatgcttggagcgacaaagagaaatataaagcacaagcagaagatttaattcaacgttttgaaaagaacttcgaaaaatttggtgaaaaagttgaacatattgctgaaaaaggtagcttcaacaaataaatttgaatactaaatcaaaaccacccgtgtgaacgggtggtttgttctgcggctataagccttccttactggccagccctaaaagggcactgacaagtcagccaactgcactactattccagcaaccctaaagggttactcttttttctttctttttttatttttctctccagtgaaaggatctaaatattcttccattgagatttggtctgcaacgatatcctcttgtaattgattacgaatataattttcaatcacttttttatttctacctactgtatccacataaaatcctttacaccaaaactttctatttccatatctatactttaagttagcatgtctatcaaatatcattaaactactttttccttttaaatagccaacaaatgatgataccccaagtttgggtggtatactaactaacatatggatatgatctttacatgcctctgcttcaattatctctacaccttttctttcacataattgacgcaatataatccctatatctttttttatttttccatatatcacttgtcttctgtatttaggtgcaaagacaatatgatacttacaattccattttgtatgtgctaaactgtttgtgtcagatgacattaaatagcatctcctcgtgttgattattttggttggctgaccaatatttattctagcacgtagagatgcattttttgtgacaatggtagaaccttttctgaaccatacgcatagcgtatggttttctttttacaattaaagagccaaccgttgttatagtctaacaatggttggctcctcttattttatgtgctaaaaatttataggcaattttattacaacaatgtacatttaaggtgaccttcatgccaaaatcgcatcactcatttaatggaagcagcacgtcttcatataaagtaccgatccctaattcaacgcatgtagtaccacatcttcaaagcttgatagttcccatgcgcacaccacgtttcatactagctatgcgactcaacttggttcataaactctttaatataagtcaatgtttcaaccatcgctggtggtcttggcacatgtccttctgccatttgataaaatgtttcatgcgtggcaccttttaactctagttggtccgctaaataatacgcatgatgaataccaacttgctggtctttccctccatgtacaattaatattggcggactgttttcattaatgtttggaatcgcttggcgtgcctcatatgccgctcgatcttttttcggatgaccaatcattcttcgtagcatgcctcttaaatcgacacgttcttcatacattaaatcaatatctgagacaccaccccagattgtataacttgttactggtaagtcttgaaatgtcaacaatccttgtaaaccacctcgcgaaaaaccaaccatgtggataaatgcatgtggatatttatcatgtagcaaccttaataattgcgtcacatcatttaaatcgccacggtaaaattcgtctttgccttcactcccattgttacctcggtagtatggcccaatcactaaagtttgactatctgaaaattgcattaatctacctgcgcgcacacgtcctacttgacctttgccacctcgcaaataaactacaatgcgatttacttcatgatgtggtgtcatcattaaagcttttacttgtaagtcatctgacaaatatgtaatttcttcgaattgatgcgtaaaatattcaattggcattcgtttacgtttgataaaacccaagtgattgcaccctctctacgcattttaaaatggtactatcttgcagtaagaaactccgttgtgcgagttcaatatcattgatacagttaaacaacactggccctgctgtttctaaataatcgttcttgcttaccaatgattcaacttcgataaaatatacatcttttacaaaatcagtttgatcatgtgtttcaatggtatattgtgctatgtaataaatatttttaactttggcgcctgtttcttcatataattcacgtgtaactgcttcagcactactttccccgcgttcccttttaccaccaggaaattcaatcccccgtaaattatgtttggtaaaaagcaattgatttttaaacgttggaatagctagcacatgattgccatctgctatctcattatcctttttaaatgtcaaattaacttgacgattatctttatccctaaacttcacgcgcatcacatccctacattgtatgttaatataatagttaattactatcgttggaggcattaattatgaaaaagatattcttggcgatgattcatttttatcaacgtttcatttcgccactcactccaccaacttgtcgtttttatccaacatgttcagagtacactagagaagcgattcaataccacggtgctttcaaaggcctttatttaggtatccgtcgtattttaaaatgtcatccgcttcataaaggcggctttgaccctgttccgttaaaaaaagacaagtcagcaagcaagcattcacataaacataaccattaatatggttgtaattgagttatatccactaaaggggggcgaaattcgagtcgcccctcttttaatatgcctgaatgcgccaccacatcttgttcaaaataataacctgctggtgtaacatctcctggataatcacctttacgagcaagcatcgctgtaaaatagcggcttaaaccatattcgtacatgccgccaataaccacttttgcaccatgacttttcaaagtatcaattgccgtttgcactttatcaatgccacctagacgaaatggttttaatacaacaactttcacattgtataattctatcaaattaattatgtccaacaacgatgttgccttttcatcaagggctattggaggtattgttccatccgctacttcatcaagcatggagatatctttaaatggctcttcgatataaagaacctgttcacgcgctaataactgtaactgtgtgaaatcttgacgatccaaggactcatttgcatctataaccaattgaaagtgaaagtctaattcccgtaacactctaatttgatgcatgatttgaggcgtccattttaatttaattctggtcggctttgttgcttttaatgactctagttgtttatttgataagccgctcgctgtcgctccatatgctactgaaaatgaaggcagtacatgaaacatttgatacaatgccatgacaatagttgcccttgcagcaggcgtattttccaatgaatctactaattttagtgctgcttcatacgtttcaaatgatttatttctattatcttcgaaccattgctcaattacatgtttcactgaggcaattgtttcatgatcataccaatctgtttgaaaagcgttacattccccgaaatatgcatttcctttgtcatcaatcaattcgataaacaaacaatcacgatgcgttaaagtgactttcggtgttacaatttgtgacttaaatggctcactatatttataaaaatgcaaagctgtcaacttcatcaaatcatcctctatacaacttatttctttgtaatttacctgttgatgtataaggtaaagtatcaaccttttcaaagtgtttcggtactttatatttcgctaaatgttgtgataaatatgcaatcaattgtgcctttgaaatgtcactttcactgacaaaatataatttaggcacttggccccaagtatcatcaggatgccctacacatactgcgtcactgatacctggaaattgcttcgctaccgtttcaatttgatatggataaatattttcaccgccactaataattaaatctttacgtcggtcataaatcatgacataaccttcatgatctatttcagcaatgtcacccgtattaaaataaccattttcaaacgtacccgttaaatctgttggatacaaatatacattcatcacattggcgcctttaatcattaattctccatgaccttctttattaggatttttaatttttacgtcaacattggcacttggcatccctacagtgtcaggacgtgcatgcaacatttccggtgttgctgttaaaaattgcgaacatgtctcagtcataccaaatgaattataaattggcaggttatattgtaatgccgtctctatcatagtggcagataatttagcaccgccgagtaatattttttgtaaattataaggttcatgtaaaccttgttgcataagccaatttaaagtttgtggcacaagcgaaatgtgcgtgattcgttcatttttaatcatcgttaaaatttgttcggcattgaatttatcaacaatgcgcacagtaaaaccttcaataacagctcttaaaagtacactgagacccgaaatatgataaatcggcaagacagatagccaattagtgtcacgatcaaatcccaagctctctttacatccgattgcactggcataatgattacgaaacgtttgtggcaccgctttttgagggcccgttgtccctgatgtaaacataatcgatgcaatgtcatctaaattaaatgatgtatttaatatgttggacggcgactctttcggcaccacagtttcattcgatgtttcatattggatacccattgtgttgtccaacaaactgttcgttgtaatatcccttccagcgaattcaatatcatccagcgatacaatttgaaaccctcgtaattccagtggcaaggtacaaaaaatcaattgtacatcgattgacttcatctgattcgtcatctcattaggtgtcaaccttgtattaatcatcgcaatttcaatatttgccaaccaacatgcatgtattaaaatgatcgattgaatcgaattatctatgtatagcccaacacgagattgttgataagccttgagtcttttagccaatagactcgcttcacagtataaattttgataagtataagattcttgaccgtctgttatcgcaatatgatgtccattttgttgtgcttgtttatataaccaaaagtccatgcgttattcctccaaaatcatttacattataattataacgattttatgacattctagcagtggttatgtttaaaaatataaaaaagtagacgaattgatgcattgatatgattgttataatgctcaatacatatcgttatatcattcgtctactattatcagttatttttatttaattttagtgtcattctgtcattttgatgtggtgatttacccattgttgccacatcatctgcaatgtcaattggtatacggttcatgtcttgtaatgcacttaaatggaatacttcatcatctaaattttcaatgagatatacataatatgttaccttgtcctttttatattttaacgttttccaaaagtccggcttgcaattcaatacattatccggaatatattcaataaataagtaacgtttgctgcctactttgtctatgaaatattttgcagtgcctttttctatacctcttatatgtgcatagtctgctgaaaagtaaatactacctattgtttcattatgttgttgtatttcaaatcgttggcctactattttattatttgtgctacaactacttaaaaaaatcagtagatatagcattaaacatattttcatccccttgaattttaaaaactttttcaaaagcaacacctctaaaaataaatacaatatattatagcaaatagaaattattattttgttaaattatgttgtcatgttcgtgtcattttgagtcgtaatacaactttacaattattaaattaacacttctacaatccaaaaatatttttaaagttttgaaaaaaattaaagtatttccactactaatttggtaaaatatgattatgtgatatagtgaaagcgttttacacttaataactccctcttaaatgcatccaggttttatgtagtaaatcatgaaaataacatataaatatagaggagatttacctttgaatacagagaacaacaagaatcaaaaccaatctgttaaaaattctgaaagacgcggcatgttaaaaggatgcggcggttgccttatttcttttattttattaataatcttattatcagcctgttcaatgatgtttagtaataatgacaattccactaataatcaatcatcaaaaacgcaattaactcaaaaagatgaaaataaaaatgaagataagcctgaggaaaaatcagaaacagcaacagatgaggatttacaatcaaccgaagaagtacctgcaaatgaaaatactgaaaataatcaacatgaaattgatgaaataacaacaaaagatcaatcagacgatgatattaacacaccaaacgttgcagaagataaatcacaagacgacttgaaagatgatttaaaagaaaagcaacaatcaagtaaccatcatcaatccacgcaacctaagacctcaccatcaactgaaacaaacacgcaacaatcatttgctaattgtaagcaacttagacaagtatatccgaatggtgtcactgccgatcatccagcatatcgaccacatttagatagagataaagataaacgtgcatgtgaacctgataaatattaaacaacaagcgaattgaattcaaattgtatttagctttatgcactaatcacatagtaaataatgagggagattttttaggcatgagcaatcaattcaaaagcgaagaagagcgaagacaatgggaacaattccaagctttccaaaatcaacaaaaccaacagaaccagcaatacggacaaaagaaatctaaaaaaggatggttctggggctgtggtggttgtctagtattatttattttaattatcatcggtatttcagcttgtacagctggtattacaggtaaccttggcggaaatagttctaaagaaacgaacaaaacccataaaatcggtgaaactgttaaaaatggcgaccttgaagtcactgtaaattcagtggaaactatgaaatctgtaggaccatctcttgcaccaacaaacgctaaaggtatatttgtcgttgctgatgtgacgattaaaaacaaaggtaaagaagcgttaacaattgatagttcaatgtttaagctaaaatccggtgataaaacatttgaagcagataatacaggttcaatgtctgctaatcaaagtgacaatggtagtatagaaaattcatttttcttacagcgtataaatccagatagcactgctcaaggtaaaattgttttcgatgtgtcagaaaacatagccaacgcaaaagataaaaaattagaagttatttctagtttatttagcgtcaagaagattacatttgatttatccgatgctaaaaaaacatcaaaagctaaaaaagacaagcaagatacagaagtagctgttgcgagttcaaatagcgataatgtaagttatgaagcttcggctactacacctgctacaacttctagtgcggatactgattctgaagatagcgaaaagtctagtaaagatgaggataagcagaatgcgtctaaaagtgataaatctagtgtagaaaaaagtgaatctaatgaggaaactgctcctgtagagcccatgccccatagcaaacctaccactagtgaagcaccacctagccaaaatattcacaatgaagatagcatgtacgacgcttcaacagaataaaatttcagggtagctcggctacccttcttttacggaaaaattaattatacataatcaaatcaaggagataaaaaaatgaaattcaaagctatcgttgcaatcacattatcattgtcactattaactgcctgtggtgctaatcaacataaagaaaatagtagtaaatcaaatgacactaataaaaagacgcaacaaactgacaacactacacagtcaaatacagaaaagcaaatgacaccacaagaagccgaagatatagttcgaaacgattacaaagcaagaggcgttaatgaatatcaaacattaaattataaaacaaatcttgaacgaagcaatgaacatgaatattatgttgaacatctagtccgcgatgcagttggcacaccattaaaacgttgtgctattgttaatcgacacaatggcacaattattaatatttttgatgatatgtcagaaaaagacaaagaagaatttgaagcatttaaaaagagaagccctaaatacaatccaggtatgaacaatcatgatgaaacagatggtgagtcagaagacattcaacatcatgacattgataataacaaagcaattcaaaatgacataccagatcaaaaagtcgacgataaaaatgataaaaatgctgttaataaagaagaaaaacatgataatggggcaaataattctgaagaaactaaagttaaataatggcatactttgattaatcgtaatttttaggagaaacgctatgataacatttgagaatatacaacaacttgagaaatacaccttaatgactatgcatggtctttttaatcaacttaaactcggcattatttcaatcgaaaacgcagagcatacgctttttacaccttatatgttggaaacgctctcttccctaggcgtgaaagacagcattgtcgatttaattcataaagggactgaattagaagactttgcggcatttaatttatcaattgaagacacagttacagtctgtttacaaagaactgaagaactattaaaacaatacaaaaatgtggaattcaatgacaaaatattaatcaattggcgtattatacaagagaaatagacatataaaagtcgaatgtaactacgtgagtattgattttattctttgtaaattacaagcatttcatattataaagtttgaaaagaggtatattgaaatggagaaaaatgaatatatagctaaatataatgaatatagtcaattattagacgctacatactcgcaagctgtagcataccttttaagtaaatatggcgctgtaaccgatgattattataaagaaaaatcatacacgcgatttttaaatggagaaatcaaaagtatttcaaaaggaaaatacactagagctagcgaaggattatattgccatcatataagcgaggacaaattccaaaatctatctgatctaagattcatttccaaatttaagtactcatacgacgttcaaaagaaagaaaacttagtgtactgtgatctaatcgagcatttaattttacatgcaattattacaaaagaatcccatggccaatttggtgtagctggattatgtcaaatgatcaaaccaacagtcattgattggtacattggcgaatataatccaaaaccagcatggatgcaagccaccaaagcacgtgcctatttgcctggaatattagtagagaaattactcattaaaattgacgatatgttaaaaggaatagaaatataagatttccttgagtctagataaatgattaatgtagatttattttttgctgttgagattttgttatagatgtttaaacctgtaattaaatatattttataaaatagaccacgcatacctatctataaacggacaatgtttataaatgagtttgcatggtcttgaattgtattaaatttcttttggttttaataaatcgactagattttcacaatatttatcaaatatgtattcctaaattatacagccttaatccagcagctactttcgaaacttccaacttagttgatataaggttcaatagtttgtttcgttctttttcagataaaccagaacttaaattgatattattgacttcataaaaattatagactaatgcctctatttgctttttaggcataagtaagtcgactgaaaactgatttacgtcgctttcataaatcatttcatgtaaattctttagactattatcgttactatctctcattaagtctgtatttttaaataaataacggcccaattcacgagctattgaaaatcttgtattattaatcgagtgattattattaatatagattgttcttccacttaaataacccgaagtattaccctccattttaatatatctaacatttaaattaagttgaaataatagcttgtctatgtcaatagcaaagtgttcagaagtaataaaaagttgatccattttgtcctttataaatgcctgaaataatcgaactatttttgattctaaaatatcttcataatgaactttctcaataactttcaattgattccccaccctaactaaaaaaatcgaacctacatcatttaataaatttataactataggtgtaaacattattaaaataaaacccctctactactatatgtaacgaagggacatgatttcaaaataaaataccttttttataaatttattataatatttttcattatactatacaaccgaatctaatctaacgatcctgaaaagaaaaataacggcggttccgcttcatattcatttttgtccaagtgttctttttcaattatttgattgacggttttccaattttttacttcatgctcttttaaaaaatggctatgaaaaattctatccccatagatttcttcatagccaatgctaatttgtttcatgtcatttctttaaaattcctaaaaatatataaactaaaagcataagtaacacagcaaaaattgccgaatatataattattgaaaaagcattgctttgcattggaactaaataatttaaagtacaaaataataataatgctaaaattccaactttaagtgaatattttaatctatccataaaatcacccttactgatatccccatttttctcctgtcagaacgtattccccggctgcatactttttagtttttaattttatatatattcccttactagtatcaatattcgatgcagctatagatccaaggaaaccaccaacacctgcgccaactaaacctcctgttagtgcagaaataacgctaatagcccccgcacctaaagcagctattgtttttgtatatgcagaagaaagatataatgttgcagtatctttacctgtttctacatattgagttttacccgctctcaattggtcttcagctttatatttttttatttcttcttttgtaaatatatcttccagtttataaccttttttctcaagttcatcaaataaattttggttactcaaatatattacctttgcttgagaatggtctaacttatcttcagcatgagctacatctgaattataagataatgaaattggactaacaaataatacaccagcagctaataataaagatttttaattcgtttttcattagtttcttttagatgatttttgtatttagatttcgtataaacagaaactagattttttcatgatcgacctatcttttgtccagatacagtgagacccttgtcatttaaatgatttttaattcgtcttgtaccaaagacttttctattagaattaaaaatatttatgacggcatgttctatgtttgaatcatctttagtgattttattatcttttctttttatagaatcataataggtacttcttagtattatcaggactttacacattgctgatactgaatattgatgtgcattcttttgaatgacttctatttttgccccataatcagcgctacttgctttaaaatatcgttctccatttttaaatgttgaacttctttgcgtaatttaatcagctctttttcttcatccgataagttatcttggtgattgaatgtacccgtgttttgatgttgctttatccattttcctacattttataaccgccatttacaaacgtcgaaggtgtgaaatcatactcgcgtataatttcattcctaggcttaccatttttatataatctaaccatttgtaacttaaactctgaactaaatgatcttctttctcttgtcataataaaatcgcctactttcttaaattaacaatatctattctcatagaatttgtccaattaagtgtagacgattcaatctatcagctagaatcatataacttatcagaagcaagtgactgtgcttgtatatttgccgatgatataatagtagagtcgcctatctctcaggcgtcaatttagacgcagagaggaggtgtataaggtgatgcttattttcgttcacatcatagcaccagtcatcagtggctgtgccattgcgtttttttcttattggctaagtagacgcaatacaaaataggtgacatatagccgcaccaataaaaatcccctcactaccgcaaatagtgaggggattggtgtataagtaaatacttattttcgttgtcttaattatactgctaatttttctttttgtaaaatatgcaaggttttaaagagaaacatcaagaactaaaaaaggctctatgtcaaattggactgatgcgttcaatatccgaagttaagcaactaaacattgcttaacttcctttttactttttggagcgtaaagttttgaacataataatattcgattgcgcaaatgattgtaacttccataaccaaaagatgtacgtttaattaattttattttgttatttataccttctaaaggaccatttgataaattgtaataatcaatggttacactattaaaagtgtcacaaattcttatgaatctggcataaactttgaattaactaaataagtaagaaaacctcggcactttatcattttaatagtgtcgagatttttatagatactacaaatatttataacatagttaaactcatctaatgacttatatttttgtttcatcacaatatgaacaattatttattggacgtattttgctctttttttatttcagaaactgacttaggatttttattaaattttctacccaattcatctgtataagaaatatcggtatcaaattgaaaatcatcaacagatcttataccagctgtaaatgataactttttatcattatttatataaccactaatagaataaccatccattgggttttctttaaaattagcgaagcttatatttttataacctttcacattgtacttcatataaatcgttattctttctttttgttcatcataatatttcttttcgtcatatttcatcttcaaaaagattccgcctagaatcaatattaaaattataattacaatcataagatattttttattcaaaaatcaatctccttttcattgtacttattgacgaacattttgaataaattaagcatattgagttttacgatgattgtataaacgttacaacccatatgattgttggttttaacattagtcaatttttctttcttataatcttaaatcatgatttggtttactttaacacttaaataattatatttttatccattctattcataacatttattcaattggacctgaaaagaaaaacaacggtggttccgcttcatatttgtcaatagcggtttaagattggcgtgttttaaatacttaatcactttcaaaatctttttagtcagtatgattcttctataatcttaaagattttcatattataatattacacattttttcgaaatcttatttaaacttatttactagtttccttgtggattgttggttgtgttttagaaattcacgtcacaagttcaatataaatattgtttttttactttttataaaagtttgagcggtggcataaatatatagataaatctaaaaattacgcctaatttttgacatgtcattcttaattattttcttattatatttgccatcgtcataaaaaacattgtaccaccattcttgtctatctcgaagagaaattttttctagatatattttccatccaatagacaattttttagtattaagaaagtttaataaactttcttttttaataagtaaacattcattatcaaattcgagtaatttagaattaatacatattgtttcaccaaatttagttttccatactccttcttccgtttgtattaatgaaaaataatctactatttctttacacggaatataaaaacttattgatttgtccttaacagaataatctaactcccaaaaatattcataaatagctggacataatttaccatctgattcagttaaatatccctctttataatttttataagcttcgctccaataatattcatataaatatatactatgtgctcgaggaatattaatacctctatcataattattttcataacctttgataatttcattactatcttctttattataaaaatatcccatcgctaagaaataacatgagtctctatcttcaaatggtatttctttctctctcttttcaaaattaaactttgagcttaaacatatatatctatgattgtctatatctatttctaaaaataattttgtttcatcaaaaactttggtattttttacccattcattcgattgatgcgaaggaagtggtgagggtactagtatttttgattctttatcaatttcaagtaatagtaaagtaggatcaatatctctaatataatcatcccatagtccagaatattgaacatcaggaaatttatctacaagtttagctaaaatttcatagtaagcaatccattgatattttttgctaattctttcaattgaattattaaagttatcataacgattaacccacatatcaaattcaccatgtaattttgcatcataacccatttcaaaaatcctcattaatgctatattacttaagtcttgatcacttttaaaaccctttacccagtttcgtacagcataaccaaatacatatctgccaaaatcgccatatgccccagttcctcttccatattccgttgtcattgagtttttaattttatcgatagaaaaatgtaaatggctatctaatttgttttttaaagattttatgtaatcgtctatatttaaattcgaatattcttttttataccaattacttttataaggtggcctaattttttctaaatttatattagatatatcttttgataaactaatatattcaattgtttgcctagcataatctctcattaaaatatgaggatataccatttctttatcaaatatttcttcataaatataattagcaatctctatatgtatttcacaaatgtcgattcgaagtgtcgcccctaaaacagaagcatataatctttcgactatatatggatcattgttattttcaaataattttaataaaccaataattttagttggaaatgttttgaataattttactaaagatttagtaccgagatctcttaatttattattagttgcagaaaatatccacgttaaaaaaatcatatatttttccgcagtttcttcatctaatttcttatagttactaaatagccaattaataatttcaaaaaccttttcattatttatagatatatattgagtccataaaaaatctctttttcctaaattgcattgtttcaataatttatgtaaagcccaaatatttaacggatggtttttttgaggcatttttattaataagacatctaaaaaattatttctaaatgcatcataaggaataacattatcggatatatagcatttagtatgtttacttatgctaccatcttttctccatactaaactatttataaaagaatatatcatgttataattgtttttaaactgtggaaatacttcaaatagctctatattaaattcatttgctaatttaataaaaagttcattaataagacctctattataagataaatcgtcttccttttgaaaataccttgtcactttttcatctgactgtaatttagttactaaatctcttttatcaacatttctatatttctctaaaaggtattctgataaaaagtaatctcccatacgctcatacgaaaaataaataatcatttcacctttatagccagtatttttaattaatatattttcatctattagcgcttctaaaaatctatttgacttttgaacatactctttagctatattattaacaacagtataggattcctcataatttagttgattaaattctgagtcgttcattaattcaactaatccttttattactttttgtacaacattaatatttttatcaaaatcaaatttatcttccttagataaattaatatttactgtcttaagaacatttgtaaatagctctgcaacacttatagtttggtcaaattccttaaatttatttacacagtactcacacattagttttaaaaataatggattgttgaattctggatttaatataggtaacttaggtagctctaatccataaaaatcacaaaaagatacaattggattatagttttcttccttactaaaaccttcatgctgaaatactacaatattgttatcttgtattgcgtttttgggtaatataacatcttcaaaaggggttctaatagaaaatattaaagctatattagaatacttctttatatggttgataaagctttgaaaataatttccccataaccttttaccttcaccttcattaagcgcatcaataataataaaagctcttttttttgtttctttggccttattacttattgaccttaaaaaattatcaacagaatttgtaacttctaaatcattaagtatttgatgccatggatcttcatttttagtaaaaaattgtcccaaaaacagataaataatatgattttcatctctaagttttttagatagatgcgctaaaaggtgtgattttcctatgccagcttcaccttgaactagcaaataaggataaaacaagcattctttacatgtttcttttaaatacgtttgatattttaataatactttttcgattttactcatataagtttgaagttctaatttttcattctcacttattttgtatatattacattcattatgttctgtcagaaaaatataagggtcaatattaatttcgtctatcaattcataaatttcacttaagtattttttcttttcttcaaactcttcttccagttccaaataattattgactgattgttctaaattagagaatatttttttgaaattcaaataaatattctttgcgtattttgatttcatcttatctaaaatatcattttcgatataaccttttaattcttttagatatgaaatattagtatatttaaaattattggtaatagaaataccttctataattttattattaatagtatcgacatcattattcgcagtatatcgtgaagctaaattcgatatattaaattctaatttttcattaataaattcttcttttaaatatgacaaagaatcttcaaataaaagcggagataattctttttttaataattcaatagcgtgatcttgcttatttatgtttaaattcaaaaactcttcgcataagtcttgagttaaaataatatcttttttactatcgaataatatattatgtggatttgaaaaattcttatttttaatattattattttgatttccaataaatataaactttaatcgataaccttcttccattttatttgttaaatactctttttttagagtgtcctctattttttgctttttacacgttgcggtaacttgaataataattttattcgtattatctataagatcaaatgctggtgcatttttttgttttttattatgattctcaagtgaatacccatatacaatatttaacaggtctctaaaaaaatattcggaatatatatgattatttaaaatatttatctttcctagttcttcaatcttagtattaagtctaattagtgtatcaagaaatttttcttgattcgttgatcgtttcaagttttaagtctccttttaaaatgaatatttcacttcttataactaatatttaaacaaaatgatcacataataatatttaatttacaatatgccactacagtgtcaacattttataaacactattcatttgaacatggtctaaaacgaataggacattgtaaatgattaaatagtctgtctctagttgatgtatatggtcatttgttatgcagataataattaatctaattaatttttacgttttagttacttggttgtgattgaggctttttgtatctagttgtaatattctccttttttagaatcataataggtacttcttgaaatttttagaactttgcacattgctgatactgaatattgatacgcattttgttgaaagacttcattttttgtctcaaaattagcactgcttgctttaaatcatcattttacattatcaatcgatgtttttctttgcgtaattttattaactctttttcatcacttgttaaaatgtcttgatgattgaatgactcagtattttggttttgttttatctaatttgagaaagttaatgatgttagatcatattctcgtataatttcgtttctaagcttaccattttcataaagtttaattattttaatttaaattatttactaaaagctcttcagtctcttgtcataataaaatcgcctaccctcttagtttaacaatgtctattctcatagaatttgtccaactaaatgtagacgattcactaaacttctaaaaaaataaaccccaaattataatagtctcaatattaatatattacaatttattcataggatttttatcatttcaattaataggttgttatcagggttaaataaacattttttgtaatagtccttttttacgttcttttaataactcaattctattcatttgattattcattttattgtctatagattttaacaatgcacttactttatcttgttcagtgagacaaggtattttaagatttatattgcataagttcgcatgagttaatttagctggtgcattacctgtgacaaatgctcgtagttctttaaaatttaaataataattcataaaaaacaaattatgatcattacttttaactacatgcgcatgattatttacccagtattgcccattagcaataaagctactcgtctcaaactgcccccattttgcaccatcttctcctattagtaatcgttcttcattattgaataaataatcttttacgtaatcaataattccagttgcaccatagtaagggtataaccccttttctcttaatgaagaagtaattggttttcttctattattttcaaagataaagatgtcttttatgaatttgttttcccactctggatattcttcaccattctcatctttgaatcgcaattcttgtgtgaagattttctgcatatagccttttttctgttgttgaagcaattcaagtttttgttcttctaattcaatttgtcggtcgagtttgctgaagaacttgcctattttttgctgttcttcaaatatagttggggtgaagatttttaaattagcaatttctttgaagtttagaccttctcgactacctccactttgtgcaaggaaaattttccttttaccttttcttgataatagatactgtccaaaaaaattataataatactcttttttcaatctaataatacatacatgttgatttaaattagcatgcgtttcaactatcgaattaatggctgttctacctattgatgctcctgtaatatttaaaagaacatcaccatagtacgttctactatttttcatctcatcatctatatctttactaatataaactaagtcattaagatttaatttaccatttctaatattttgactccttaaaaatggtatgcctttgtttgtatagttttcacttccacctttgggagtctttccactacctattttggtagtaagattccctaacttcttctcttcccattcgccttcaaatcctgggaatctcaactctggcacatttttcgtttgtgtattactcatctttcaacaccccaagttctttcaggtatgcattgatttcttgttcaatttctgcgatttctttgtcgatatttttcaaatcttgttggacttgatctaaatcaattggtgcttcttcttcgaatgtatcaacatatcgcggtatgtttaagttgtaatcgttatcggcgatctcttgtaatgtcgcgctgtagctatatttatcaatcgttgctttacgcttatatgtgtctataatacgttcgacttgggcatcgcttaaatggttttgattttttcctttttcaaaatcattggatgcatcgataaatagtacgttgtcgtcttgttggcgacattttttaaatactaaaatacatgttggaatacttgtcccatagaaaatattggctggtaacccaatcacggcttctaagtagttcttttcttctattaaatagcgacgaatcacaccttctgcggcaccacggaataatacaccatgtgggagtacgactgccatggtaccttcatcgtctaggtaatgtaccatgtgttgaataaaggcaaagtctgctttggattttggcgcaagcttgccgtaaccactgaatcgttcatcattttcaaattttgaatctgctgtccatttcgcactgtatggtgggttcgcaataaccgcatcaaatgtattgcctaaaaaggctggattttccaatgtgtcatcattacggatctcgaagttctcataacgcacatcatgtaataacatattcatgcgtgctaagttgtatgtagtattgttacgttcttgtccgaaataacgatacacttgcgtttctttaccaacacgtaacaacaatgaaccggaaccacatgttgggtcgtacacgtgacgtaatttatctttaccgtctgtgacaatcttcgccagtatcttagatacttgttgtggtgtatagaactcgcctgcttttttacccgctgtcgccgcaaagcgcccgattaggaattcatatgcatcacctaacatatcaatttccatgtcactgtgaacgaatggtaagtcgtcaagattaaccatgactttagagattaaagcagtacgttctttgacattgttacctagtcgcgttgaactcaaatccatatcgctgaacagcccgataaagtcattttcactttcttcacctaatgtagatgtttcaactttgcgaatcgccgtcgctagatgttctatatcgaaatcttgcgtttcaatttcacgaatcatcgcactgaataaatcttgtggctcaatgaagtaaccgacttgatcaattaattctgcttttaagtcttcacgatattcttcatctgcccatgcttcttgatacgtgatgtcttcacctgacaaggcatctgcatattcttgttcggctttttcagataagaagcgatagaaaatcaagcctaaaatgtaattacggaattcactcgcatccatgttccctcttaaatcattcgcaatcgaccataattttttatgtaattcagcttgttgctgacgttgtttttcagtaatagacatgtgattcctccgcctttgcataagtaatttatctctttgtgtaatagatttattataacatttggttatgttgcgatgttgataatttggatgttggtggtggaaattttgagttttagtggcgcaattgttattgaaaaattttatagaaatgttgtagctttcaaatgctttcaaaatcatttatattcttaatgatgtcaaaaagttgttcattcatacataaataaaaccaatcaacaattgagttggtgaaaatcaatcgttgattggctttgatgcatattaaataatgcaatatatattaataaatgttagttatagtatattttgtcaggattgggtgaatgtctaagttttaattatttatctaaattatctgcaatgaatttcttaatttcaggagagaaataaacagcaaatcctcttgtgctttcacctgatggcttattaccggcatagattacaccaatagcttcgtgtttactatttaatataggtgaaccagagctaccaggctgaataattgcatccgatgacactatattcccattcactgataatactttaccagttgattcatacatttgtagtttatttccattaggatttggataaccaatgactgatataggttcattttctttagcttctgatgctatattaaatttactagtgaaatctttgaattttctaccttttggttgtgttgatttttcttcaacttgtacaaccgcaatatcttctttaccaggataatctacaatcttagtaactttataaagtccaccaccgttattataaaaaccattaggatgtgctttgatttcatcaccgactttcatgtgataggtaacatgtttattggtaatgattgtatgatttccaactacaaatcctgttccagcgcccatccatgtaacaccactgtatggtgcaacatttgtatttgtaatttgtttaacagtattttcggctttggctgtttgttgaataccttcaaccattgttgtgccgacaccagttattgatgttaaaatcgtcaatgctgcaatacttttgatgattatatttttattcatttttctgctcctctaagtatttgtataattataatgttagctttttgaagttttattttttttaatcatttcgaataaatggaatcacagagatgatttgaattgttgagtttgttgttaatttttaaaatcatttatctatgtaaggatttatttatctgtgttatctgcaatgaatttcttaatttcaggagagaaataaacaccatatccttttgtacttttatttccagggccgtttccaccaaagtgaacacctacaacttcgtatttactgttaaatacagctgaacctgagttgcctggttctacgaaagcatcagtaataatcatgttgcctttaactgacagcacttttcctgttgactcatacatttgaaatttatttatatatggttctggatagccaacaattgaaatgcgttcattttctttagcttctgatgctatttttaaaatgcctgtgtaatctttaaaattcctgttttttggatgaacagctttatcttccacatgtagaatggcaatatcttcttgacctgaataacggacaatttttttaactttataaaatccgccattattatattcaccattgggatgcgctataatatgtgcaccaatttccatacctgcaacgacatgcttgttggtaacaattgtatttttaccgacaatgaaacctgttccagatcctatcgaaacgacaccattgtatggtgctacattagtatttttgattagtttcacattatgttcagctttagccgtttgttgaataccctcaaccactgttgtgccgacgccagtcactgatgttaaaatcgtcaatgctgcaatacttttgatgattatatttttattcatttttgtgctcctctaagtattcgtataaatataaggttaggtttttgaagttttattttttaaatcatttcgaataaatagaatcacagagatgtttaaaattgttgattttgttgttaatttctaaaaatcatttatcaatgtatggatggatgatttatttatctaaattatctgcaataaatttcttaatttcaggagagaaataaacagcaaatgaccttgtactttcacctgttggtttatcactagcatacataacaccaattgcttctcgcttactatttaatataggtgaaccagagctgccaggttggacaaccgcatcagatgtcactatatttccattcactgatagtactttaccagttgattcatacatttgtagtttatttccattaggatttggataaccaatgactgatataggttcattttctttagcttctgatgctatattaaatttgctagtgaaatctttgaattttctaccttttggttgcgttgatttttcttcaacttgtacgaccgcaatatcttctttaccaggataatctacaatcttagtaactttataaagtccaccaccgttattataaaaaccattaggatgtgctttgatttcatcaccgactttcatgtgataagtaacatgtttattggtaatgattgtatgattcccaactacaaatcctgttccagcgcccatccatgtaacaccactgtatggtgcaacattcgtgttggtaattaatttcacactattttctgctttggctgtttgttgaataccatcaaccactgttgtgccgacaccagttattgatgttaaaatcgtcaatgccgcaatacttttgatgattatatttttattcatttttgtgctcctctgtttattcatgatgcttttgatatagacgtttttttatgttatattcgaccgatgtttttcattaaaattattgaacacatgctcatggtgtatatttaaatttgtttattgttcaatgtgcttttgaataaaatctttgatttgaggcgtaaagtatacggcaccattatattcagaaccaatttttccaataccgccatacaccacacctatgacctcattgttagaatttagaactggtgatcctgaattcccgggttcaatgtatgcatcaaaatttaaaatattgtctttgattctttttatagttcctgtagattcaaactgtttaaaactattttgagcaggtaatgggtaaccaataactttaattttgtcatcaactttagcatctttcgcaaaattgaatgcttggacattttcattaaaattaaagccttttggtccacgttcgactgcttgttcttcaatattcatgacagagatgtcttcatcacccggataatcagaaatgcttttaattttatatataccaccatttcctttgtcaccgtttggatgggcagtaattctatcgccaactttataatcttttgatacatgtttattggtgataattgtattttttccaattacaaaacctgtcgcatctttaaatgaaacgacgccattatatggaaaaatatttgtatctttaacttgcgtaacattcttctctgcatttgctatttgttgtgtctcttcaacgactgcagcatttattccagttactgaggttagaatggctaatgctgccatgcttttaatgactatatttttattcattttcaagctcctttacaattcgagatatgttgcaacgctcgtttaaagtcaatttgtttatttatctatgttttctgcaatgaattttttaatttctggtgtaaagtagacgccatatgcatttctgttatcatcattttttacatcagaagcaaaatgaataccaactaattcgttgttgctgtttaatacaggtgatccagagtttccgctttcagtatgcgctgaatatacaatactgctaccttctactgacatcacagggccagttgactcatataaaacatatttatttttgtatgggtgtggataaccaatcactttaattcgctcaccagctttagcccctgccgcatatttgaatggcgttacattatcattaaaattaaagccttttggtccacgttctattgcacgctcttcaacttgaatgactgatacatcttctttacctggataattaataatctttttaatcgaataaataccaccattacctttatcactatttggatgtgcagtaatacgatcgcccactttgtaatttttcgacacatgtttatttgttaaaatagtattctttccaactacaaatccagttgcacttttaaaagcaactacaccagtatatggaaaaatattagtatctttaacttttgtgacattattttctgctttggcagtttgttgtacttcctcaaccaatgttgttccaatacctgttacagatgttaaaattgttaatgctgctaaactcttgatgactacgtttttgttcattttaagttcctctcttttaattattttgatatctagatacataattcagtatatttagttaattatgtaaccgttttcttaatcactctttaaaaaatcaacttcacgaatgaattgatgatacttatttttcaatattattttgaataaattcttttaattgtggtgtgaaataaacaccgaaattcttttcagattcatcttttccactacctgcatataaaataccaatcagttcatgtttagaattcaatacaggagatcctgaattacctggttgtgcatacgcatcaaattccataaacgttccactgatatggttaatcgttcctgtcgattcaaacattttatattttgtttgtgcaccctttggataaccaataacagaaattctatctttcacttttgctccgtctgcaaattttgtataactaacgttcttattaaaattcaaaccttctgtacttgtttcatgaacatgaactatcgcaaggtcttcttttccgggatattctacaatgtctttaacgtcgtagtttcctccgcctttacctttactcgaatgatgtgctgatactctatttttaaaaatatcattacttttagcgatatgtttgttagttacgattgtatttttaccaacaactacaccagtaccacccacaaatgctaccactgaattgtatggttccttagttgcatcggtaatttctttgacattcttttctgctttggcaattgaatgaggctgattagaaatattttcagcaaaaccaagagatgttaaaatagttaaagcagttaaacctttaaccattacatttttattcatattttacctccttccaaatttatttttatagttaatgtatctagatacacatttactatatacattttaaataaaaatattaattaaatattaattaaccacttattaacgttttattaaattattttacatgaattgactcatttatttaaatatgcttaaaactcaatatcacgcaattaaaattgactttttaggattattttggtcttaaatattaattattgaattaaaattgtaatatttattcggaaattaggtgattgaaaatatatggcggaatggtgaacaattcatgtatttataatctttcactttactatgtattgtgtttaacaacattattagcgattagttcccctattatttatgacaatatgcagtcaatcaatgaaacatgtatgtatgagtatatttggaactagtaatgtattgttaaatattgaagatgattgaattatggaatttttttcgagatatgttatttcggggatcagattttgcgattttgccttggatagagtagttgcgatttgtaaatacgtttttcaggttcgattcaatttcgttgttaagataatatggattagtttcactgacatgttgatgcatgtcttttttgttctgataaagtataaaatgtttacttaacattacttagtatgacacctgctaattcaaacattatttgagacattcttttcaaattaattataaatttttacctatagactagtttgatatttatctacatctcaaaattctcatcaacaatctttcacatccaacatttttactttagtttttataattcaaaacaacaaaactatgttaaaaaattattctattttttagttaatagatagttaatacatttttgatatttagttaattgttcttttaaaaaattattattatattttcattgtaaacgtttacaatataaaaaaaggagcaataaaaatgaatacaaaatttttaggtaaaacattagtagcaagtgctttagtattaacaacattaggaacaggcttacattcttcatacttaggattagatacaaataaagttgttaaaacggctaaagcagaagaaaaaatgacagatggtcaattatggaaaaaagttaaagattcattacatgattctgatattattttaagtaacgagtacgaaacaatcaacgttacttatttattaagcaatggatattctagcagcgtttctgctcctggaaatgatgatggaggccatctaacacaatctatagactttaaaggattaaaacaaattgatttaactaaggaaaatgtctacgatgactttaacaaaaagctagatgctaaaaatacatggaattctctaaccgagaagttaaaaggtcttggtttactacaaaatggccaaaaagtatctatttattcttcagatagctcttctccagtctcgggtaaagtgggagaaggagtaactagtggtggcgaaaatactctaactaaacgcttcatcaacaaaatcacaattgattaaaccttaaactcaaatttccttaattcataaaacattaataactaaccctttcttacaaaccacctagcccataatatattaaaacgtcatttttatttcaattagcggaaaataaaaaaaccattccgcattaactttggcaagttggaatggttaaaaaaatattttagaagccagcgtttggcttgcttagacgacatgttcgcgcatgtcgtcttatttttacatttatataataacacgcaattcaataaaatgtctaatcaataaacctcaattacattcaaattcaaaaacttttcacctaatattcatcgcttaaataaacattacgtttaattaaacagacattgtcaatcgcgtctaatacccctgctgtccgaaaacaaaattattttgtattcatatttaactgttctctttcctcccttttcaacgcaactaaatttcttttaccgttagagccccaatctttaatctttaattgttctaccgctccatttattaaatcctttaaagagtaaaactgctaatagcaacgtgataataatatagattgccaatgttaatgtaactggtatactcccttcgataaacatataaacgtaacgtgtagcatatgtgattggtaaatagaaccacgaatgatctccaagcacttctaatccaaaataaacgttaaaaataaacattaaaactccgacaacaatagccattacatctttaatgaaaatactaaaaataaaaagtagcagtaatataattacattgaaaaacaatgatacgcctataaacataagtgttattttcatatcatgtgaatgccacaataaattaattgatgctaatagaatacatatggctgtaatagtataagtaaaaatcattgatgcatttaaccaatttagcctattagcttttcctaaaatatgattaaagtgaccaatattttcttcaaaattgataacttgatagacgtttatagaaattaatagcgatgtaattgcattaaaactcgctgtaaacaaacttatttgtcgaccattccataaatttacgtttaaataccaatttataaataatataaacaatatggttacaataatgggtacaaatgtgagcgcttgcttagaaaatttcaacttacatgactttaattcgttaattatcattttaatcgccaacttttcttattatttaaaaatgttactatcgcgaaaataatgatgctaacaataatcgaaatatataaggcattgagatcattaaagtattttgaattatggtttacaactaaaccattaggtagtataccaagcgtaataagcgggattctctgcattatcccccacggcaacacccaaaataaactcttcaatgttaaaaacaagacacaaatgactgataatactaagtttattaatattgatacgaacacaccaaagtatcgagttaataaaaagttgagcggtatcaatggtagagatactacatacatcaacaatattgtcaccaataacaacatagcattaaccggatgtggattaataattaggtcacctatataagcaataataaatactaaaaagcaatgtaccaaaaatgctattgataaaatgaaaatctttgctcttatttcttttgtaatcgaccaattattacttaagtaataattaaatgatttatttctcatttcaattttaaataacgaattacaagccatacataatacaatcgggatgaaagcaattggccaaatattaaatagtaaagttatatatggtgacacactattcgctgttcccgtattacttttggcgaataagactgtgaaaatagcaaaacaaagaaataccagcggacttattaataaaacatacatactgaaagaatttttaaatttgataccttctatctttaaatgtatcatttgtaatcacctttcgttattttgaagaatatctcttctaagttttcatctttgttatttctttgctgatattttagctcaccctcatgaataataccgatatgatctgctaaaacttggatttcagataaaatgtgacttgaaataataatactagtaccttgttctgttaataattttagaagttctctaagttcttggattccatatgggtctaaaccattagatggttcgtctaatactaaaatttctggctttttaattaatgccattgcaattccaagtctttgtttcatacctaaagaaaagtccttaacctttttctttttatcgacatttaaattgactaagcttaaaacactattaatttcgctgaaatcaacgctttcatttaaacacacaattttcaaattatcttgtgcacttaaatgattatatgtcgcaggtgtttcaataagcgaaccaactttgtgcaaatcatttcgtgtcattggtctattatctaatttaatttcccctgaatcttgttgaagtatgccacatataattttcataagtgtcgttttaccggctccattaataccaagtaatccataaacttcgttattttctaaagtgatattaatatgctttaatacatcttgatttttaaaccgcttcgaaatgttttcagtaactaattttgccataatcaaaaactcctttgatttattaacttgctttttgatttgctacatttaatgctttatacacatcaagctcaccatgcccatatctactaaatggtttattattcttagatgtcccatgctgatataacaattcaatcgctttatctggatgtttttcaagatgatatttatcaatgattaaagctagtgctcccgaaactttaggtgtggctaatgaagttccagcttgataaatatatcttccgttattggcagtagttaaaatgttctccttatgcatatacccttcattcatccatttatccacaccgaattgatttaaataagcaaatgatcctccgggcgcagcaatatctgtataattcataccaaaattggaaaactcagatagattactcttttgatctgtagatcctactgtaacgacattgtccatagatgcaggaacatctttcacttcgccattaccttgatattcacgctgtaattttagtttctgtttgtcattgacatcaataccatcattaccagctgcagcaacaacgatagattttttcttcttggcgtaattgattgctttctgtaacgcatcgtattctactttttcatcttttctaaatgtttgatggtcatttttgtccaaaataatataactaccaacactaatattaatgacttgatttccatcatttgcagcttgaacaatcgcttttgatacccaaagcagttctgtttttttactaccaaacacgcgatacattgtaaatttgttattcggtgcaacacctattaacttaccattagcactcgtttgacccgacaccatcgtgccatgtcctttcctatcattgacatcgtgaacatcacctgtttcctccggttcagtacctctaaaaccgtttaaaggtactaaatttttagaatcagtcgagaaattatttttcaaatcgtcatggtttttcatcacacctgtatctatgattgctattttggtgttagcatgttttggcaaatcatcatacgatgcaccattattggttattttattcatatcccattgtcttgaaaataatgactcatttgatgttctgtctattgttttctcgctagtaatacaagttgaacatgtggcattgatatatttaatatcatttttatagtttgctaaagcattagcatgcattttcgtcattttaatctgtgccacatgtaattccggtatattatagacaacgtttaaggacttctttttaactaacttgttaaatgttgctgtatttttgtattcaacactgtaatatagttcttctgacgctgatgcattactcattgtaatagatattaaaagactcaatattattaaactaataatagcgcgctttatgattttcatattctaatctcaaatgaattccagaactttatatggttcaggtgcgacaacattctttttaaatgtttttgacgctaattcataactttctgaaatatttgctggatatattgatacaccataatcttttaataatcgaatattattttgagtaactggattttcccacattcgtaaattcatatttggaaatatagaaagtttttcaaaagctgtatgacaaatagttaataataaattgtcacatataccatttgcaattttattaatcgtattagaagtcgcaggtaaaataataatcttgtcatgtttatttgctatatctacatgatttaaaaaagggtcttcaaattcgtcataatagttatcgcaaaattgctttaatatttcaccattaataaactttctaccgtttgttgacgcgattacatttacttcatcaaattttgattttaattcaataatatagtggctaatattgatactattaactgagccacacaaacaaatcaatacattttctcccatgatatacgcctccattcagctaattaaaaacgcattggtccaatttttttcattgagaatttttgtatttttcagtgtcatcaatgttagatagacccctaattcaccttctaaaaggccaactttcctacttttaaatacatcttgcttattttcattaatgtctataaaattcaccagataatcttccttataatgagaaatcagtttatttattaatacagtgatataatcagacacttcatttaattcaaaattcaaattcataattgttaacattaatatttgtgatgacaatccatgacaaatagttggacttattaaattttcatctttatcatttactacttgtagcatcacttttttagacattttaattatttcatcatcttgtaatgcttggccgattaaaaacaacgtcgtcattacacccgtattgccataacaccaaccattccgaataaaattgaaatgattacgttcagaaattaaatcgtaacgctgcaaccatctttcgtggttacaaaatttttcgtccatgataaatttgtacatgtcttttaatatgtgctgatgattttcaatcgtaattcctttaatcacgcataatgcaaataaagacatcggtcctagcactccatgtgcaaggccaagattgatattaccttcagtaaaataatttttatcagactctaaaaattgactttcttgtgggactacccagctatttttagaatattgaatatctttaaagtatactaatatgctttttaatgctttaacattaaattcattctcatctactctatttagcaaatatctccctatcccagctaatccactgacagtatcataatttaatggatttaatggttcttgtaatatttgatcaaatttattttctatttcatttacaatgtgaccatcaatattatttaaaatattttgataatttttgccattttgcgatgctaaatccattgaaaatgcaatacctgaaagtccaccaaacaaagaattgttatattgaccactctgtaaatatggtgctaatttcatgatgtacttatgcacaatttgctcagtattaatatcgaaaactttttgataagcatctaaaaacaaaatgatacctggtataccatgtgataaagttgaaggttcaaaataatcggtttcagtagatgcttttgaaatgaaatcatctacttctgaaatctcttgaaacttcttcttcaatattagattcatatcaatcatttttgtcaccacaccaatgcttttgagttttaacaatttcttttacaatagataaaacaaatgtttcttgatccttatcaatgccaaatattcgattgcagcgcatatgaattaagctgccaataatccttgaccttttagtagttaaagtttttttaagcccttcatttaatttgctcaaaatttggttgccatcttttaaaattcgataaataccactatagtgtttagccatatattcaaaattattagcaggattacatatagttacaagttcatttttaaaaggtctaatatctttacttttaaatgatgtaggtacatagttattaacaatttccatacgctcttcattagaaattgaaaacatctcaaataaatacattattgaaatagcaacaatatatggtcgatcaaacttaaaatcattttcaataatattgacagctaaattcgtgtcatattcaaagaaggcttctatttcattaatcgtgttctttccaccatatctaaaaaattctggctcgtatgatacaaattcataatctgaaacttctgtcgtttgtcgaacatgtggtaaccaattcttcaagatgctgtatatttctgcgtaattttcgtcattcctgaataacctcaactttaaaatgtcaccttgtttgatataacgcattaaaaaatattgatctatatctcccttatctttaagatgttttacaaatggatacaaattgtcgatgataaatgtatcttgcgatggcttatcgatatgaatatgtaatgcaaaccagtctttgtcatattcaatatctgtatttttatattttggaatttcgatttcgggtcctcgataagatgattttttataaattggtgtaacaatttcatacacatgatcattctttgattgaggtaaaaatgattctactaaacgtacacgtttatgcttcttatattctttcatcaataaatatctatgattagctaatgataaatttagtagaagcttgttatctccataaactaaattcacgatattaggtatattgaattgttcttgatatttcaaaaattgttgatcccattcttcatttttaggtaaaggtaataccatctcgttaattttccaatatgctggtttaagaatgacatttttatatctgattcgtggtgaataactaaatgaatcaatactcacatcattcataggttcaatgcatttcacagattccattgaaatttctcgtaacaatcgatataaattacattcttttaaaaagttatacatattgtttgattcaaatagtacccttttatttagttggctagaatataaatataatttgttaaaggtagcaccaacataaatatcatctaaggtaagctcatactttgaataactattactacttcctaaattcaatgaatattcgtatgagtcatgattagttaatacattatgatttctcggatatttcggtatgttatttatagaaatcatttctacattgtcatcacatatcatcttctgataataatgtcctttttcatgttctaattttgctaaagtttcagtatcaattaaatgatgaaatcgcccaaatgtagcgccagcattaaaagacgccgttaaaggactaataacaatgagctcattgtactgattgtaaaaacgtcctaaataaagttcagcataaacatctgcactcattggcgcatgataatgattgatttcattatcgttaatcaatgactctacatctttttcatttatgactatctcatcgttatttctcaaggcatgtaaaaatttttgcttaagcattacaatattatttccatcggtttcttcttcttgaaaaattgttgtcccgaaacctgttatatctgaaatcaaatctttaatattcacgagttgttcaaatccatacttttcaataaaacggttgtgaagaactttcaaatctgtgaatccaatattatttcttgataaaagccacaataagtacgctgcttcagatatatttgttgctatatcttgatgtaaataattgttaatcatgtcaattttggtatcaatttgaagatagtttttacatttgaatagtgccttcatatgatgaataatgtctttatataattcctcgccaaatccaatttcagttttttcataagctaatatcaatttctggatttctctaatttttttcacaaaatcatcattatgtaaagaaagtttatttaaaatataatttaaattatcgctatatgataacggtggtctgattgttgaatatataatttcctttgagacaagattatggatatatactttcactttagtaatatcattaatttcaaattcttgatttatcttttcagctaaatttgaaaaagtaatattattattcgtcacagtggttttgatgaatacgagtaattcgctatttttaatggaaaaagatgtatctttattgttgtttaaataaatagcactttgttcatttaaatatattcgatcattgataatatgtgctttactattccaaataactttcaaattttgataatattcatcaatactctcaatataactaaccagtttatacaaccattcgccatcgactttcacatatttttgaatactatttccaactttaagacgtgttggttcatttacaaaatgccccaaattaataccacttaataatccaaatggagttggacgtgttgacattctaattaaatattttaataaactttctttagcatctctaaccttcttgttatcgccatcaaaatttatttcttgtaaagtacaatataagttaaatgttgttgttaggattgattctttcatctgagcatttaattgtaagtcgctatatttaatttgttcagtatttaaaaataaattgaaaaattcaactgataataaaggtgttctaatcatacaaatacttgacggttcgtaaatagtgttcatttgtaagcacctcacatatttgaatagacaaatagagccctttcaggctctatttgctgtaatcttaacagcagaagctattaaaactaccagtcttagcacaaccaggagtacataaactatgacttgtaatacgttcgtcacctgctgaatcatttgagttattgtttgctttaacttgcacgtctaaatcaagaactttttccatagataaaacctcctattattagttgaagttaaggcctacttcaattgtcatattatcccttttcacacaacaaatcaataaattatataattatattttgtgaattttttgtaaacacttattaatttagtaatactattttgataattagatttttgtgtttttttattactatttattttcactaataattttgcatctaagttcataattttaaatttattgatgaattttttaatagattaatcaattcatttatacaaatacttagatatttttatctatcaatactattacgaatttggagatggctgcttgagattaattaatagatatttatgcagttttgttctatttatacaaaatttagcaaataataattgaagttattttaaagatgaggatataaacatataatttcaatgacttgattattttcttaaatgacatgttctaagagggtcaatataataaccaaagcttgtcattacttatatgtaaagatagaggctaattacataatcctaacttatttaacaggaagtcatgaaaactatattacaactaaaagtataactttccatcaccaaagtcagaatttattgaaacactcaactgataatatagaaggctaattataaaaatacctggcgattaataaactgtttccgttttttagcacttaatatatttaaaaagacaaatagagccctttcaggctctatttgctgtatccttaacaacagaagctgttaaaactacccgtcttttcacaaccaaagctacaaaaaagatggctagttattctttcgtcacccgctgaatcattagtgttgttatttcctttaacttgcacgtctaaatcaagaactttttccaaagataaaaccccctatttaaaagttgaagttaagacccacttcaattgtcatattaatcattaccacacaataaatcaatgaatttaataataattatttgttattaatttgtaaatcgtcattaattttatggtactattgttagtttaaacaaataatgtaacttctttttttaatatgttgtgaatattttttgtttaactcttaaatttcgggtttaacttcctctatttctaacagttatactccaggattagtttctttagaatccgtaccgattaatttaacagtatggttttgccagtcaacttcataagtagatgtaaacgttactgtattttgatttttgtagttatttccaacccagtgtagtcgattccattgattagtatatctatccatttctctttggtaagttactttgattttagatttttttgtatcattttgtttatgagaaagtacgcttataaattctgggttaaagttaccacgcgccaataaaggcatttgatgtgttggcaagaaattttgaccagcatttgaactactttgtctaccacctaaaaacagttcattaccatatgttgggtcataactatctctaccatatggtccccaaccattattcataattttgtgcgcctcaacaccccagccaattgatttatgatttgtttttctatcaatcgtagttctgtaactttcttgtttataatttatcgtttctgaaaatgattttgatccatttaatccacctgataagccattagatatattaatatctccgccataagaataacctaatgtttgttgaacttggaattcttcattttgatttttaggtgcatagtcaacaacatttacagcatcatttgattctgaactaaccgaaacattatacttaccgccccaataaaactgtgagtaattgtaatcttttggattaggctttttataacctgaattaatgtttccggctgccttaagtactaacgtatctttgtcataacttttatccttaatgaaattaaacgttaaaatttgagaaatattcaatttatcattatcagatgttgctgttgttttgtataaagtgattttgtcatctacttttttctcgcttacaggtgtgatatgttgagctgcatcaactgtattcgatagcaaaagcagtgcaattgatgaagcaactgatgatttgactaattttttcattttcatattaattatgtcctttcactttaatttcgtgtgttttccaattaacttcatatctaactacaaagtttctatttacaaatgcattatgctttctttctgcgtaaataccagttctagggaataaagtcgcatatgtaatatctaagtttctaccatatgaaatttcaaattcactcgtatcacttgaacctttttcatgtgatagtgtagtgataaacgatggattaaagccactttgaactaaaggtggcaattgattatcaggagcaaaatattctcttgctgaacctgttggaccatttggactttgtacgaataaatatctatcatgcgcagatttttttccatcaggcgtaacaaattcgtttgctttaacaccccatttaacagattttgagttttgcttgtctacttcactgacataactcttttgggtataactaattgttttagaataattaaatgagccattgccacctatagatggtgctgactggaaattacctccaatgttatatcctaatgtttgaccaacatcagtagtttctattttgtttttaggaaggtaattgattaagctaacatttggatctttagtcgtcagtcctatattatattggaatggccaaatcattcgtttagttaattcatatccactacccttcacatctgaaaatgaagttctggaattaataaaaccttgcattttaacaattaaagcgtctttgttatattttttatcttttacaaagtcgaattggacattttgagtaacgccccatttcttactacttacatcctccgtacgtttgattacttcagcaccatcaccaatattttcaatattagtatttgctctagattcttgaatcggagatgctaaaggtgcaatcagtcctactgacaaagttgcagctaacattttttcttaaacataagtttcactttctttctatataaatttttaatacaaatttattctagattatttcacttatttataaaattaactgttcattaaaaaataaaatgctataaaatattaaaaatgacacaatttattcatttatgctgctgaaaaccggtcattttggcgcaaccttcattacctttaaatagttccctttatattcgaacaatatgataaaattaccgatactcaatcttttctctgtaaaaataaaaacgaactttaatcaaatcttcaaaaataatgtttgtattatcacaaataatctataattgaatttaaaattaactgattattaactattgtccgttaaacgaagatgattacttcgtatactgttataactgaaatgttctatatatcatttcgtaatatcgcttacttcatctaaaaaaatttaatgctatgatttagtctaattaaaaacatatatatatttactatgaactaaaatttcactttaaaaataaaaaaccatgatttcgaagtcttcataaactgaagcttctactctcatggcaatttatactatgatattcaattataatgcctagtctcatagtaaacggctactacattcgcatgtacttcgttttactgtccacgcatggtcgttgacttatttatattataatataaatattttatttttcaatacttaattttaaaaatcccctatgaaaatgttgatgagctacatctttaaatcttattatacattgtataaaattatattgcgaggtagtaaattgatattatacacttttggttgtgtatgcatctcacctatcttttttgcttttttcaaataagaaagtattaaaaattaatgcctatacaggaacagacatggctaaacttgatttaaatagtcttgacgacgagcacgtaaaattattaataaatgaattaaaatatccagaaactcatatcgatgtaaatgaattaaaaacaatagttgctagtcgaataaatgaaaggcaagaaataataagttttaagttaggaataaagtacttattaacaataaaaagagggaacatagaaaaagataggttttcaatttcaatcattttcaaagatacctatcacaccctagttagaatagatattaacggtggtactcacgataatccagatggaacaatcgctccgaaaagtcatattcacatatataatgataagtatgataaaaaggataggtttgcttatgaaattaacttgaaagatttccccgacatctataacttgtataatgtgtatatgtcgtttttagagtataataatataaaagaccttgaataaaggagggataatatgactacatttgatgctaaaaaattaaaaaaagaatatcttgattggtataatcagaccttagagttttctaatttatcaaacaatgtagtaagaatagatactccttttaaagataattctttagataatttaataatttacgctttatacgatcagtccagagacatgattacactgacagatgacggctatactatatttgatttagaaaataatggtatttctttaaataaatcaaaaaaacgtaaaaagatttttgaagagcacctttcagcttacggtattaaatataacgataaaactcacgaaatttttgttcaaactaactttaaaaattttaataaatcgaaacataatttattacagtgccttatatttgttaatgatatgtacttactttctaatcctaagtcacagaacatatttacagaagatgttgcaaacaaattggatgaacataacatttattacggaagagatttacctattataggaagcagtggtgttgttcataatttcgacttttttattagcgctaagaaaaatcaaaaagaaaaatttatcaatgctatttctaaccctaataattctatgattattaagtcgaaaataacggatgctatgcaagcaaaaaaaataaaaagacacaggcaaaatgagtttatttttattttaaatgactcaaaaaaagaaataaatgaacataataaaaatcttcttcatgaaaactatattagtacaatagattatagcgaattagatgaaaagataggtttattgatttaatatatatagacgtgataatatcaatgtttatattaaatgaaacgaatttgaaaatttcgaaacagcttaagatagcaaattgaatagccttattgataatgcagaatcgtctacacttagttgaacaaattctatgagaatagatattgttaaactatttgggtaggcgattttattttgacaagagtcagaagattatttagttcatagtttaagttacaaatggctaaactttatgaaaatggtatgactagaatcgaaattatactcgaatacgatttaacactctcaatcttctcgaactgaataaatactgggtcattcaatcatcaagacaacttaataagtgatgataaatgttcataccattttgcaaatataaccagatactctcaacaaaatgtagagttcaaaattaaaaatgtccctaattggcacattgctgtatgataataaattcaacttagatttcaacaatataactaatgatgcttatatttaccgcgatatcaaaccaaacagcccatccacaaacaaattagaatatatcatgttaataatagtaaatgatatatcttccaaagaccgcaaactgtagcagaacatgagaaccttgcgcttttgaaatggtctaataaatcaaatatcattgaaactttaatcacataaattaacagtagtcacctgttcgcagttctataaattacaaatgcaataaaggctaaagtaaactaattactttagcctttattaataatttagtcgaatttattaaaaatcgactaactcctggttatgctacgctttactttataatccgcacgtagatgccgattgattatattataatattattattttattttttcaagcgtatatataatatttgattttctttaagtaacagctaaacattacatttcaaaacgattaggtcatgcagatgtacatacaacgcttaaaacatattcacatttgattaaagaatttgaagataatgaaactaaatttatagaaaaaaatctgaatgatttgttttgtgactaaacttcaaaatcttgtgactaaaattaggattattcatcaaaaattagtcacattgtggctaaaaaattttaaatggatataaataaataagaagtgtaaaaatgaggataatagctcaaatgcagatatatcaagggattgagtccaaaataaaaatagcgcttaaaatgggtaaaaccaatttaagcgcctttacggaaggtaagggattcgaacccttgagacgcttgtgacgcctacacactttccaggcgtgctccttcggccagctcggacaaccttcctcaacaataaatatgtaataaaaaaacagaagcgatatttcacttctgcttgtatgactcctacgggactcgaacccgtgttaccgccgtgaaagggcggtgtcttaaccgcttgaccaaggagccatggctccacaggtaggactcgaacctacgaccgatcggttaacagccgatagctctaccactgagctactgtggaataatagaaaataatggagcgggtgatgggaatcgaacccacaacatcagcttggaaggctgaggttttgccattaaactacacccgctaatgtaaacgattatggggcggctgaaggggatcgaaccctcgaatgtcggaaccacaatccgatgtgttaaccacttcaccacaaccgccatgaattaagaatggttcaggacagagtcgaactgccgacacatggagcttcaatccattgctctaccaactgagctactgaaccgtaatggtaataataatggcggtctcgacgggaatcgaacccgcgatctcctgcgtgacaggcaggcgtgttaaccgctacactacgagacctattaaattaaaaactatgtattgcgggaggcggatttgaaccaccgaccttcgggttatgagcccgacgagctaccgaactgctccatcccgcgctaatattattttgaattacctaattaatataccataatcaaaaacctaaagtcaagaactttttgaatttaatttaaatgttatctcttaaataattacttaaatatcgtagcaacatgttctctgttgaacacaaatattagtatattcatttttgtagtgtacgtcaacgacattttcaaagttttttgtgtaaaaaaacgcttcttattcccttttatcatataagtgtctaatagttgtcataaatagtgttaaagcatttaaaaaggtataggagttataaagtttacaacgcctataccttctgaaaaagaaattataaaagcttgttacaccgcatattctttcagtcagcgactaccaatataacattgtagccctaagacattgcttgacgcctcaattacaacaatttttcaaaatcagcagctacctactgacacaacataacacaacccatacactaactatcgtgtcatgtaatcttgcatccgatcttgcaacgctgtaaatgtttcgaagccatcctcttctaagaagtgccctccatcttccacgatttgcaagttcccctctaatgcattcattaaacgctgggtctctttatatgaaacgtatttgtcatttttagaactcaatccgtaaaaattgtcaactttctttttaatattatcgtaatcaatggttacattacttaaatcaatatctaaatctatattttctgcatcttctttaaagcccgctatactgaaaaagccttcaatcggctgatcaatcatttcaatatattttaaagctgtgattgaacctaaaccatgtgttacaaaatatgtatcctttttgcgtacattaatttgtttcgtcatagcttcaatccactgatccactgtcttcgcttcaggggattcaaaattaaataatgttacgtcatatccttctaaagttaagttatgctccaaccactgataccaatgatttctactatttccatgcatagaatgtacaataattacatctgtcatctcattctctcctttcaacttactacttcttttctatttttaaaaaaatgactgattacctataattgtaaaataaaaacaccttaattagaaatgttatatcgcaaagtgacatttctaattaaagtgtattgtcatcatttcaatatcattcaaaaacagctaaacctttgtctctgcttcaatttcacaaaaataattcccgctgaaagtatctatatttacacattacttccaccattatataacttaaaaatgactatatttcatcaaacattatctaaaggcgtcgcacctacaccaacaccatccaacaattaacttacaactctgcgattacttcttcagcagcaactttaccttgcgtaatacaatcaggtagtccaaccgcttcaaaagatgcaccagttactctaagtcgtggatatgtttgtttaatatgtgcttgaatctgtctaatttgttgaatatgaccgacatggtactgtggcatacttttcggcaaacgattgacaattgtaaattcaggatcacctttaaatgtcatcatttgacttaaatctctacgtacaatcgatactaattcattatctgtatgatcatcaaccacagtatcacctggtttacctacatacgcacgaatcaaaaccttaccttccggtgtagtaaatggccattttttcgatgtccaagtacatgcggtaatgtctgtatcactcgttctcgcaattacgaagccagtaccatcatgggtattttcaatgtctttttcatcaaatgccaatacaacagttgcaacagtcgtactatccatcgttttaaagtaatcaaatgctggatcttgtccgaaccaatttaaaaacacttgatgtggtgtcgttactaatacgccatcatacacttcttctagttgatcattgtaaacaattttatattgtttttgagatgtaattatatcatccactgacgtattgtagcgtattgtcacacctttatttttaacatcttgttctaatgcttcaataaatgagcttaaaccatgcttaaattgtttgaattgtcctttcggtgcgccaggatataattgtctttgtttcagacgcttatttttctcatccttcataccttttatcagacttccgaatgcctcttctttttctttaaaattaggaaacgtactcatcaaacttaatttatcaatatcggtaccataaataccacccattaaaggctctattaaattctcaagtacctcattacctaatcttgctctgaaaaatgcaccaacagaaatgtcaccatcctgcatttgagtaggtttttttaataaatcaaaccctgctcttaatttaccaagtggcgatattaattttgtagtaacaaatggtttaatatctgttggaatacccataattgaaccacctggaatcggatataatttatttttcgcaaaaatatatgattgtccagtcgtatttgtaacaatatcttgttctaatccaatatctttcgctaattctgtcataatcgtttttctacctaaataagattcaggccctagttcaatcatataaccatctttacgatacgattgaatctttccccccggacgattcgatgcttcaaagatggttacatcaatattaggatcttgctgttttaaaaaatatgcacttgataaacctgttatccccgctcctataatagccactgatttagtcacaacgtttcacgcttctttcgtcattaaaatatagacttgatttcatcaataattgcaccgataaataatggatgtgtattcggcatttttggacgataataattcgcaccaatatcatcgcaaactactttacattcataatcattgtcataaagcacctctaaatgctcacatacaaaacctactggcgtatatataaagtttttatactgatgtttttcatataaatcacgtgttaaatcttgtacatctggccctaaccaaggtgtacctgtattaccttcagattgccaaccaatcgcgatatgttcaatattagattgttctttaattaaaagcgcagtatgttctagttcttgtggatatggatcattattcttttcgattaaaccttttggcaaactatgtgccgaaacaactaataccgtgtctttatgttcctcttccggtatttgagctaatgtttcgttgactttattcgtccaatattcaataaatttaggttgttcataataatgtttcacatgtgtaagttgaataccatattttgcagcttcttcatcagcacgtttgtcatatgatcctactgaaaatgaagaataatgtggtgctagtactaccgtgattgcttcagtaatgccatcattgtgcatttgttcaaccgcatcttcgataaatggtgaaatgtgttttaatcctaagtatagtttaaattcaacatctgcatatgctttatttaatgctgaaactagcgcatcagcctggtcatctgttgtacctgctaatggtgataaaccacctataaattcatatctatctttcaaatcttgaagttcttcttcagatggacgtttaccatgtctaatatctgtataatatggctctatgtcactttctttataaggtgtgccataagccataactaataatcccatttttttagtcattgataataccttcctttaaatgaattatctttcatgtgcttcaatgtaaaactatgattatctttgtgtatatgtgtgtacgaattcgcttactttacgtaacgtctctggttgcacttctgggaatacaccgtgtcctaaattaaagatgtgtttaccgttctccataccttgatctaatattggtttcaatctctcttcaatgacattccatggtgctaataaaattgatggatctaaattcccttgtaatgttttagtaacgcctaattgttgagcctgattaatagacgttctccaatctaggcctaatacatcaatcggtaaatcattccattcattgattaaatgactggcacctacaccgaataaaattaccggcacatcatgtttttctttaacctcactgattaatcgaatcatatgtggtttaatgtaacgtctgtaatcctcgacatttaatgcacctacccatgaatcgaaaatttgaatcaattcggcacctgcttcgacttgagctgttacatatttaacagatacatcaactaaatgattcattaaagcaaaccatgttgcttcatctctatacatcatcgcttttgtaaaattgtaatttttcgatggtccgccttcaatcatatatgacgctaatgtaaatggtgccccagtaaatcctattagcggcacatttaacttttcttctgttaaaagtttaattgtatctaatacatatggtacatctcgttcggggtctatttgagaaagtttctcaacatcttgaattgttttgattggattatgaatcactggaccaatacccgatttaatttctacatcgacaccaattggctttaatggtgtcataatatctttgtataaaattgctgcatctgtatgataattatcaactggtaaatgtgttacataagcgcacaactccggctgatgtgtaatatcgaatagtgaatatttttctttcaattttcgatattctggttgcgaacggccagcttgtcgcataaaccaaacaggtgtatgtgatgtttcttcacctttgatcatttttaaaattgtattgtttttattatgcaccataaaggcctcctaaattaaaatcattcttatctatattatcatatcgctcattcgttcgtattttcaataaataaatgtcataaaactgacatttaatcatagaactatttattgtaaatttaaattctaaagtccattattttgtatcattacttctaaatatctcgcaagattcattatagtaattttaatcaattattaatagtggtaatgactagtttatcatcgtataataaataaaaacataagggggacctttcatatgaagaaactatatacatcttatggcacttatggatttttacatcagataaaaatcaataacccgacccatcaactattccaattttcagcatcagatacttcagttatttttgaagaaactgatggtgagactgttttaaaatcaccttcaatatatgaagttattaaagaaattggtgaattcagtgaacatcatttctattgtgcaatcttcattccatcaacagaagatcatgcatatcaacttgaaaagaaactgattagtgtagacgataatttcagaaactttggtggctttaaaagctatcgtttgttaagacctgctaaaggtacaacatacaaaatttatttcggatttgctgatcgacatgcatacgaagactttaagcaatctgatgcctttaatgaccatttttcaaaagacgcattaagtcattactttggttcaagcggacaacattcaagttattttgaaagatatctatacccaataaaagaatagattcgaagaaaacttccattggttatgctgttaacgtatagatgctaatgtaatctgaacgccgtatcatttggcgttcaacattacatgcacctttacaacatacatgccaatggaagttttttagtctcgtaataatgtttcctgatatttcaactttttaataatacttctaatcgttaataaacctacaatatagaaaatgagtacaacatagaataacgtcatatgttttataataaatgtcactgcaaacacagtacaaataacaaacattaatctatataaaaactgttcataccctttgattaccttctcttcaggtacaggccacacttgaggccataagccatatgcttgctgtgaataaaattgtgccatttgtaacaatataatatatacaaataaacacccaataattgctgtcactaatggatatgataaccaaaccattaataaaactgcaataattactaacctaaagataatattaaatgcgtctctccctcttataaagcttctaataaataagaataaatacatcgcattagagttaaatttactaccctttggaactggtaaaagtatatctagataacttcttctgactgcagattctttcaaatgttttacatcggtgaacatattaacaaatttataataattcatatgatgtcgatgttcgattgcaatcattttctcccaaggatacaaaaagcctggtttatattttttaactaaaaattctattaacacaggcaaagcaaccatcacaaatgcgatgtaccattttggagctaatagtaagtaatatgttagagcaaaggtgatgaatgatattaaattaacttgccatgttttaagtcccgattgataccattgccatcttaagcgtaaaccaacatatggaaaaattaatgcactgactccaaaacaaatataaaatgccacattatgttgattaatattgtaaaacaacgggaacattacaataacaataatgagttggattaatatgcgcgcaaagtaactatataaaatcgcatgacgcataaattgagacatgtgtttttcaaatggtaataaaaagattttatccgcttcttttaacagtggtcgcattggaaaaatagatgtcaacgcaacaatcactgctgctattaatgaaaaattgatattcgttggaatatgttttaaccattcaccatatccaaaaataaatgcacccagcaaaataagtaaaaagaccatgaaatgaccattaaatataaacttattataataatttttctctttacgaagggcatgtaatcttttattaaataatgtggtagcttggttacgcatgtacatctccaccttgcgtcacatgaatatatatatcgtctaatgtttgattatgtaagccagtttgttgtctcaatgcttctaaatctccaaatgcaacgacttcaccttcgtctagtatgataaaacgatcacagtaacgttcagctgttgctaaaatatgtgtactcattagaacggttctaccttcgtttttcttttcaaccattaaatctaacatggattgaattcctaatggatctaggccaaggaatggttcgtctataatatacaattcgggattaacgataaacgcacaaataatcatgactttttgtttcatccccttagaaaaatgactcggaaaaactttcaactcattttctaaacggaatgtctttaataatggcattgctcgattcatcgtttcatcacgatcaatatcatatgccattgctgtcatctcaatgtgttcctctaatgtgagttcttcataaataaccggtgattccggaatataagataactttcttctataagcctctatgtcatcattaatgttgatatctgaaattgatagagatccttccataggtgtaagcaatcctagcatatgtttaatcgttgtactcttaccagcgccattaaggccaataagtccaacaatttcgcctttgtttaattcaaaatttatatctttaattacagggcgttttccatatccacctgtaagctgttctactttaactgtcataaggcacctccatgacttatattgtaccaaaaattataaaatgctcatattaaatacacatgtcctaatatcgaatttttagcgacaatgttataatgaatggtaatactagttgaaaaggagtgtagtcatcatgtcagaaacaattttcggcaaaattttaactggagaaattcctagctttaaagtatatgaagacgattatgtctatgcctttttagatatatcacaagttactaaaggacatacgttattaattcctaaaaaagcttctgctaatatctttgaaactgatgaagaaacaatgaaacatatcggtgcagcattacctaaagtagcaaatgctattaagcgtgcatttaatcctgatggtttaaacattattcaaaataatggtgagtttgcagatcaatctgtatttcatattcatttccacttaattcctcgatacgaaaatgatattgatggatttggttataagtgggaaacacatgaagacattttagataacgatgcaaaacaacaaattgctgaacaaattcaagcacaattttaaatgtatgcttaatctaagctcgaacgggtataatatgattaatattataacaattgcgtttgaagtgataacatcaaggttagcaattttaaacaaaatgagttatcaagataacagatgttaaaagtgaggagaatataaatgaaagcatcacgcattctattcggtatcggtgttggcgtagcagctggttttgtagttgcacttcaaggacgtgacgacaaaagtgtcaagaacaacacgatcgatcgtactgcccctactggttcaaaatcagaactacaacgtgaatttgaaacgattaaacaaagttttaatgacattttaaactatggtgttcaaattaaaaacgaaagtgcggaatttggtagttcaattggtggtgaaattaagtcattacttggaaacttcaaatctgacattaatcctaatattgaacgtttacagtcacacatcgaaaatttacaaaatcgtggcgaggatattggaaacgaaatttctaagtagcaggttacgttctcgatcacaactatttttattagtaacagcatatttattttttaaaattaaatgccaaataaacgagatgacattagaaattagatatttcttgtcatctcttttttaaaactcaaatgaacttatgtttacaaattataggaagacattgtttgtagtgattttcgcttaaatcatatttatgaattgattgaaaacattgcttaggattcattgtgttatccttgcactttgattacgctttacttaaatcattatcgacaaacaacatacttatattttcattgagccgaaccttatatacacattacatataccttacttgcacaaattattaatctggtgtttattataattacatatcactatatttttagcatttgtataacttagttggtcaaaagatgcttttgcatatgccctgccatatccattttttatattattcaagttttcaaatactcatgtcacacgcgcctttttcataagtgatgctttattagcaagaatatgtgttcgcagaaatttgttctgcattctacttctacgctagtcaatcagacaattttaccaatccccactttcgcgtttcaaatcaaacaatacgtcgctcctttcttcttatataacaattcttctaacatgatatgttactattgaattactgaacctgagttagttataatctaacttatattgaaaagagatgaggcgtaagatatgtttttatgtaaaagacaaattgatatcaatgcacgatttggtttgcctagaattgcatttatgagtgcagttgcaaccatcattatgtttttagttagttatgaagtaatgtattttttatctaatacgccattatcagatagacattttctcatctttttattacttgtatttatgacgtatccattacataaaagtatacatttattatttttcttaccatatagaaaatcgtttaaagttcataagttaactaaaagaaaatggcttatattctataatacctacgtcaatcaacctgtacacaaattttatttttgcattaacttaatattgccgttaattatcttatctgcaatgttcgtttatctaacaatttcattcccgcaatatggacattattttatgttcttattggcattgaatttcggtatttccattacagatttattatatttaaaaataattatattttctaattatggacaatatatagaagaacatagtacaggtattaatattttgaaaaaaattaaaaatccatatcatttataacaaaataattatagcaaggtgttattatttgtttttaggctatgtaatagcttacaatcaaatgtatatagaccttgtttttttattttcatcaatttctacccctaaacctaatgctctagtctgatgtcatgggttattgattggtgataatataaaactatgttatattcacgatgattaacttacaaaggagtttcaactatgaagatgataaacaaattaatcgttccggtaacagctagtgctttattattaggcgcttgtggcgctagtgccacagactctaaagaaaatacattaatttcttctaaagctggagacgtaacagttgcagatacaatgaaaaaaatcggtaaagatcaaattgcaaatgcatcatttactgaaatgttaaataaaattttagctgataaatataaaaataaagttaatgataagaagattgacgaacaaattgaaaaaatgcaaaagcaatacggcggtaaagataaatttgaaaaggcccttcaacagcaaggtttaacagccgataaatataaagaaaatttacgtactgctgcttatcataaagaattactatcagataaaattaaaatctctgattctgaaattaaagaagacagcaagaaagcttcacacattttaattaaagttaaatctaagaaaagcgacaaagaaggcttagatgataaagaagcgaaacaaaaagctgaagaaattcaaaaagaagtttcaaaagatccaagtaaatttggtgaaatcgctaaaaaagaatcaatggatactggttcagctaaaaaagatggcgaattaggttatgttcttaaaggacaaactgataaagattttgaaaaagcactatttaagcttaaagatggtgaagtatcagaggttgttaaatcaagctttggatatcatattattaaagctgataaaccaacagactttaacagtgaaaaacaaagcctgaaagaaaaattagtcgatcagaaagtacaaaaaaatccaaaattattgactgatgcatacaaagatctattaaaagaatacgatgttgactttaaagatcgtgatattaaatcagttgtcgaagataaaatcttaaaccctgaaaaacttaaacaaggtggcgcacaaggcggacaatccggcatgagccaataacacaaaaccgagcgaccgtggttcaaaaatcataccacggccgctcggttttttcgcattaaaaatcggacagatgagctcatgtttcagtatactcatctgtccgatatcttttaattcttaatcgagtgattcaggattgtagaatctacgattttcaagaccaaatattttatctgtaaactgacccttgtcagtttttttatatgccttttcaaacatattcattctagcatcgatattatcgatatagcataaaatttctgcttcttttaagtatggcagttttggagaaccatactctaacttaccatgatgagataaaatcatatgtcttaacaacatgatttcttctccttcaatgttcaattcacgagctgcttcaactacttcatcactcgcaatcgagatgtgtcctaataagttaccttcgactgtatacgacgtcgcaacaggaccactcaattctctaactttaccaatatcatgcaaaataataccactatataacaaacttttgtttaacaatggataaatgtcacaaattgattttgcaatacgtaacatcgttaatacatgatagcttaagccactcgcaaagttatgatgatgagaactagcagctggatatgtgtaaaatcgttcttgatattttttcaataaatgacgtgtgatacgttgtaaattagcattttcaatatctagcaaataatgagaaatctcttcttgtatttctgccggtgataaaggtgcaccatctacaaattgttctgtttttaattgatcttcagttgtcgctagtctaatttggttgactttcatctgtttatttccgcgatagtttatgatgtcacctttaacatgtacaatttcttcaggcttgattgttgccatatcattttttgtagccgtccaaaatttcgcttcaatttcaccacttttatcttgcaaatgtaatgtcatataatctttaccttgtgctgttacaccctgtgtagctttatgcactaagaaaaagtgatcaactgaatctccgggatttagattctctatatttctcatcgtttcccgccttcctctattttgtttaatgtaatcacttcttttgatggaacaatattatcttttacacatgtaaagtatagtacttgatagtgttctgataatgatcgtaaataattcaacattttttcagtacgttttttatcaaaatgaacaaatgcatcatcaacaattaatgggaacggataatatggtcttagtaccttaattaaactgatacgtaaagctacataaagtaattcttttgtagattgacttagttcaacaggatcatataattgaccattaacatgtttaaccgtaattgaatcttcattatagttaatcatcgtatatctgccatctgttaaatgcttcaatatttctaccgcttcattaataacttgaggcaaacgtttatctttaatttgtttaatgtgttcatcaactaaactttgtaaataacttaaacttgcccaatcttttgcgatatcattaagttgatttttaagactgtgatattcatgtcttaaattagcaagcgttgtatcagtttccatgtgattgatttgtgcacttaaatcactgacttgtgcttgcatttcaagatattgctcattatattcgtcaacttgagtagccaataaatgatcttcttcttcaagttgtgcagttgttttttcacttaaactagaacttaattcataagaatagttttggttctcaagatatttagttaaatcattaaaacgactcaaattactagtataagtttggtaatcttcatgatgttggtaaaaatcttcttcagtaccaacattgataaaatcgaatagtgctgtaatttctttattattttcttctaattgagcatttaaatgatttaattcatttgtaacaagtttggtattttcagcattaatacgccatttttcattcgtgtcttcagctgatttcaaccattgttgcacatcgtggaataaagataatttgttgaaataaacaaattgtgattttgtaacagcttcagcatgattgtagaatgtatctaattcttgaaccaattgctggcgttgttgatttaaatcactgatatgttgatctaatgctttaatattcgccattgtagaaatactatcaacaattaaatcatttgaaattttagatgataagtataattcatccttaacgttctcaactgtcgattgtaattcatcatgacgccctttcgcatcatttaaacgaccttcaatatactgacgtttctcttctaaaatatctttatttttcaaagcttgttgccagtgatcacgaatgcgatattgctcatcaagatcaaaatctaagtcataattttcatctaaaatggctagttgtgctttaatttcttcgatttcatctgtgatggcctcgctataatctacttcttttgatttagacatgatgataccgataacaaatactaaagttaatactgcgaaaataataccaaacaacatgttgtttgaaataaatgagaaggcagttaaaccaatacctactaatgttaaaagaataaacgttgttcgtaacaatttttgacgtttttgtttttcttgttgctcaatttcgaaacgttctttcaatttgctatacaagttctctttttcgtttaattcaatgacttgttgtgagtattcttttttcttttcaaaagtctcttcaggaactattttttcttcaacagaatctagttcgctatgaaccgcattatcttcgattttattttcttctaaactacgttctaattgtttaatgtatgcagcttgttcttgtttattcttgatttgctcactgacataacttttcattgcctctgaactatctacgtcatgatgcgtttcagaccaaccaatatttgattgcaattcatctttatcacgttgtttattcgcaatatccttttcgattgcagtaagttcaaattctttatttttaatttcattttcttgttgattcaaactaatgaaggcgtcaatatcagattgtttaactggctctaattgagtcgcttcttctttaagttgagctaaacgctcatttcttaaaccaatatctctttctaacgattgcttatgcgctcgtgctttttcgtaacgatccacacctttttctgggaatgtgattggctcaatatttaactgttgttctagagacttccattcttgtgaatgatcatgtaaagcaacctctttttgtttttcttcatgcatttttgataattgatttaaattatgctttaaattctctaatcgacgtgatgatttatctcgatcatctactaagcgatgatatgtttctagctttgcttcttcttcacgaatttgactttctagttgttttaattgctcaatttgttgattaatgatcggatttttacctgattttttatataattcatcttttttacgattaatcacttcgcgcattgacgtgaattcagttgatcctaaagcccctgcttgtaataaataatcttgcaattgtttttcatttagatttctatgaatgtcttgaagccctagtacatcaaatgaaaagataccttgatatgtctttttagaaatataattaagtttcttttgtaaccaagcatcatcacgcacagcaccattaggtaaatatactttcacatcaccttgagcactgcctttaattcgttcaacttcaatctctaagccatcatcaagaataagtactaatttaccaccgtattggttacctagacgtggttctagtcttggctctttagactttttagttggaaatccaaataatatcgaatggatgaatgcttgaatcgtcgatttacccgcttcattttcaccaaaaatttcagtgaagtttttattaaattcaattttacgttgaacaaattgaccgtaaccataaatttcaagtgatttaattatcattttgttcacctctcatttcagcttttaatatttcttcagcacgattaactaatgctgtatggtcgaatgttccataatcgtctaggaacttagatgcccttggatttaaatataaatctgacatcgctttatcaaaaacagtttgatcgactaataattccgctgaaaattcattaactaaaggtgactcatcattttgtgcatattgtatttttaactcatcaatatatacaaattgattttcgttttcttcataatctgtaatcatttcttcaacttgtaataaatcttgaggtgaaattaatgtctcactattaataacaagcgttaaacgataaaaggcttttccttcttctctcacttgttctttaaagttttgaatgacctcgtataaaccttgcttagatgtcttatccgtttcaatagttgcttcttcaaatctaatatactgtgtaggataaaatttagtctttaattttaagtggtcaccctcgattaataagcaacctttttcaccttgctcattaaaatgtctaccttgaatattacctgaatagttaattacaggcatatcacttaattgttgacgttcatgtatatgacctaaagcccaataatgatacaatttactgtttaaatcttctaaaatgaactcggtatatctttcgttaactgaagatttactatacgtaccatgcaagacaccaatatgtatgcctttttggccttgacttgatggatattcatcaatcttgttctcataacttgctctattttcataactaaatccgtgaatataaattgtttcaccagatttagtaattgcttcatacgtctcaactttatttgaaaatacagaaacattatctggccagtttgatgaaatctttgatgataaaggatcgtgattaccatgacaaacataaacaaagatttgttcattttgtaaacgttcaaattgctgttttaagaaaatttcagcacgtaatgttctgttttcactatcaaataaatcacccgcgataattacaaaatcaacatcttgttgtaatgcaatatctacaatatttttaaaactttcataagcacttttttgaacatcctcaaaaattttagggcttatatgactcttagatttgaaaggactatctaaatgtaaatccgaacaatgaataaatttaaccatacatccatatctccttaattaaaggttctaacatcaattttgcaaaatccaactatacaaagcattctaatcactatattcatacttataggtgtagtgattcattagctgatttattaaaaccagtcgccatttttatttcgttaaaaaactattatctacacaataataaagtgctttagtcaaatcgtgatgttttatttattaacaagtttattatttcttcattttaccataatacgcttcatatcgtcgatgaacatatgaaattgagacacatttataacagtttaaaattttatttgtagcgtacgttgatatttttcaaaaatttcagtcggaaatgcaatttccgtagttattaacaccgctagtgaatcaaatggcacattaaagatttacatgattactctactagatttgctcggcagtaatgaccaattagaaactaaatgtcaaaactatcattgcacttaatacgccaaacattttcaggccgttcttaatgagtcattaaaagtgaaacgcttttccatcagtccgatacatgaccgaactaatagtattatgttgaaaactttacacttcaaaatgcaaaaaggaagttaggacacgtttactagcctaacttccgttactgaatgcatctgcccaatttgacagagagcctctaacttccgttatcaaaactaaaaaaactacccacaaagtctcggactctgtcggcagtctattcctctatttaaaggattgaaaaatattattttaatattagtcagcgtaaatttcgtctaatggtttaacgataatttggttgatttcttggaatacttgactcattttttgttcagcattcattaatgcagagatgttttcatctttttcaattgcttgcgcttgttcttgcgctttttgtaaatcttcttcagcaatttcttcaccttgcatttgtttttgttggaagttaatttgagtttcacggaactcgtcgaataactttttagattcttcgttagcttttacattagcgaatgcttctttgattgctttgtattcttcgctttctcttaaagcttgttctaattgatttgcataatcatataaatttactgccatggttatagcactcctttgttgtgatgtttattaaaacgttcgatattactttaccacatctcgcttttttagacaaagattgcaaccaaaccttggaaaaatccaataataccacctaaaatgaaacctaatgacataatcaactttagttctttgttagcaatttctataattaatttttcaatataatctaagtcaaacgtattaatttgttcttcaattaatcctcgtaaatccacttttttcataattgtagataagtgaatcgataatttttcaatgattaaatttgctaatttgctagagagttgaccttctaaataatcaacgaattgaggcattaacgtaaccactggcttattcgcttgtttgcttgcatatgttgttacatacactgatagattttcagcgatttcattaaactgcgatgcatctaacagttcattcaatggtttatctttaaaagtttgatattcattggtaattaacgatgtcacaattgttcttgctttaggatgagatgttaaacgtataagttcttgttgaatgcgatctgcaatactctcttttgtcataaacatttgcaacataccaattaacttacctttctcattgaaaaaagtatccaacatatcattaatatcttgtgtgccttttgcagatgataaataattccttgcacgatcacataataagtctgttgcgttatctacatgctgatttaaaaatgttacaagttgatttggcaataaagatgctattgtttggttttgatgctttgtataataattattcaattgtgattcaatatattgatttccattagtttgtaatacttgttctaaatcaatatcgatttgagaagtaatttgttttattgacaattgatctttcgtcaacttttgtaactgctgttgaatcatagattctattgcttgctgtgattgctcgcttttcaatttttcattaattaaagtttctgtaagcaaatgctcttcaatcacttggccaattttagttgcaatttcttcgcgtcttttcggtattaaacctggtgtaaatgggactctaaatttaaatatatagtatggtttaaaggggtgaaacagcattctaattgcaattacattagtaatgccaccaattatcgcccctactacaatcataaatatgataataaatagtgcattcataattttgactcctttgtgacaacatagttattcattataccactatttttattttttaattcattaatcatttcactttctgctcaatttattattagtttacatacaaaaagcgatgcctcacctctcgaaacaggtgtgttacatcgcttttattatttattaaaagtatataggcctagatatgtactaattcttctttagcatttctgttaaagtatgtttcagcttctctcattttagaagtaccgaaaattggttggttatctggatttaatacacgataaatattgcttactttgttactttgtaaaatgtacccattacgagtctcaatgttattccaataaatatcacttgttggtgcatggtttggatatgcacaatgatttcttgaaattgtttgaacgatttctaatggatcacagccaaatgtactgtttaatacttcagagtctctgaataatgcacaaattgaaatacaagttgtccagtttggtaatactctctctttttcgatttgtactaaagtctttttagaaagtccaattgtttgcgccatagtatcttgcgtataaccagcctctatacgaaccattttaaattttgtttgaattaaatctgtaaaactctgtctatccattctgttatctacctttctgtttggggaattttatccggacacaagaaattgcaataatacacatttcttgaaacacagattacatcttaatatatttttaataaaatgaaaagagtcaatttcacatttgtattaaattttgatcaagtcaacaagagttaagtttactttataatgaagcgaaagtaaatgaagtaaaattttatgcataatcactagatttgataaaacttacacttttataatgatatcaaatttacaaagaaaactgtataataaaccctatcgctataaaaaattcatcaaaatcagattaaaaattgtctatttttcgacaaatatttaaaagctcattctaaatcaacttattttccattgcataaattgctgcttgtgtacgatcgctaacttgtaatttactaaatatatgactgacatgtgttttaattgttttttcagatacaaataaagtttctgcaatctctttatttgttttacctttaaccatttcacgtaacacttcaatttctctctttgacaacttattcgtgtagtgtggtttttggctaactgtttcgaatacatcttgtgccttaggatgtatcattttttcaccgttcataactcgtctaatagtttcaattaattgctgaggctcaacgtctttcatttcataaccatcagcacctttattgattgctgaaattacatgttcatcatcaacataacttgttaataccaaaactttaatatccggataatgtgccttaatatattccgtaatttcaataccattcatgccaggcatcactaaatctaatagcacaatatcagggtgctcatgctcttttaaatattctaaaaatgtttctccatctgcaaagtcttgtaaaacttctatgttttcaatcgtggataataaaaatcgcaatccttgtcgcacaatataatggtcatctactaatattactttgttcatgggttatctccttaaatcaagctattttataggaattgtgaattgtatttgtgtaccctttgttggctgagaatgaaaggtcactttacctcttaataatttaactctttgttttatgttattaataccgtgtgatgaagctatctgaacattatcgatctcaaatccttgaccataatcaatcacgtcaatatatagtatatcgttcatttgttttaatgtaagatccattttattcgtatcagcatgtttcttaacattattaatacactcttgtaatgctctgtatatgttttcttcgatttcattagataaatcgattaaaccttctacatttacatttaattgtatatgcattaatttactatatgctgtcaaagcatgaattaaaccttgctcaagtccaactggcttaagttgccaaatcaatgcacgcatttcattaacggcattttgactcgtttcctcaatcgtcttgaatgcttgtttagcgatggattcgtttgacatgccatacgcagcatgtgctgttagttttacagaaaataacatttgatttactgaatcatgtaaatctctagctaaacgattacgttcattaatttttgccgcttctttttcacggtctgttaaataaatacgtttgatggctgaccctaattgaaatgcgacagactctagcaactctaaatcttcatcgctatatatttcagtatttggagacgctacatttaaaatgccgaattgttcttgacccgatttaagtggtaccgttgcatgatgtgtaatattgtcattttggctaggaaatgctttagaggctaagttaatacgagaacaattgacgatattcgacgctttcattagcctacgttgattaaatgctttcacacaccaacaagacccatctttaatatagtgacagtggtctgctgtcaaagattgtggtagagccacatgtgatacaagttcatgttcacctacgctattgatgaaaaatatccagcctgtcgtgaaattactgccctcaattaaatattttaacgcaccttgggtcatgctatacatttcagtttcttcgtttaaaaattcggcaatctcttttaataaagctagtcgcgtcctttgttccatcaaatcgctccaattcatttttacgtgtattaactattatacattgagttattatatttttaaatcttagacgtaaacatgataaaatggccttgattactcaatagttatatttcggagaactgatttgtgatatgatattaaagactataggaggattttatgaaatttaaaataccagaaaactttaatgacttaagtttacgagatattttccaacaacttaaggtacctaaaaaagatttacatcatttaaatatgtctaaagatattactattaatgataaacctgcgcgattaatggataaagtgcatactggcgacgatgtatttgttccaaccatcgatgaaaaaagtaattatgttccaagttatcgttatgcacaaattaaatacgaagacgatgatatggcaatcgtaatgaaacctaaaggtgttaagactcaccctaatgatttaaaagaaagcaatactttaatgaatcatgtgatttacactattgatagtgactatgtcgaaccaattcatcgactggaccaggaaacagtaggattattaattgttgctaaaaatcctttaatgaaaaaaattcttgatcgcatgttagaagacaatgatattacgcggatatacaaagcaaatgttaaggcacttttacctttaaaaccacaaacgattgatatgccaattggtaaagataaattccattcgaataaacgacgtgtgtctcctactggacagcgtgcaattacacacattttaacttcaaaaatgataaaagaagctgtgtgccaacttgaaatcaagttggatactggacgtactcatcaaattcgtgtgcatttagctgaaattggtcaccctgttattggtgatcctttatatggtgattcaacgttaagacaattagaacttgaaagttacaaaatagagtttgtgcatcccttgactaaggaagtcatttccgtttctttggatgactaatttgattagttttgcatgatatttaaacatgcaataccgcattgtaactaaatcaagtatcaacttaaatcggatagatggaaaattattaattttttcagatgttcggtttttttgttttttacgatgcttaggattttatattttgatattttagtaattattcattttataacatccttggataatgacttgtagtctttttcaactgcgttacgtgtatctatggacaatacatgacatcataagatttttatcacaggttgtttggccaatacatgtacaacaattcatcatataaaaaataggttctataataaaacggactccatgaaaagtttttccttttcatggctctatatcaaatcagacttataagttcaatttgacatagacaaaaaataaagcttgaacactacatctacctgtaatgcccaaactttattttatattaatatttaattaatgaggatctaccatatcttctggtttaatccatgcttcaaattgttcttctgtaacatatccagtttgaattgcagattcttttaaagttaaaccttctttatgggctttcttagcaatttgagctgctttttcataaccaatatgtggatttaatgcagtaactaacattaatgattgatttaaataattatcaatattctcttcgattggttcaatgcccactgcacaattgttattaaatgtttccataccatcagctaaaagataaattgattgtagtgtattatgcataataactggtttataaacattcaattcaaagttaccttgtgaacttgcgaagccaacaactgtatcattacccattacttggactgcaaccattgttaacatttcacattgtgtaggattaactttaccaggcataattgatgaacctggttcattttcagggatagaaatttctgccaaaccagctcgtggccctgaagccaaccatctcacatcattagcaattttcattaagtctcctgctaatgccttcaatgttccatgcaattgaacaacttcatcatgcgctgtaagtgcgtggaatttattttcagaagatacaaatggataacccgtattttctgaaatataatgtgccactttatcaccaaattcaggatgcgcattaataccagtaccaacagccgtaccaccgatggcaagatttaaaatgtgcttcttagattcagataacattgtttcacaacggtcaagcatataacgccagccactaatctcttgtcctagtttgatcggcgttgcatcttgtaaatgtgtacgaccaattttaataattgaatcaaatttatcttctttttctttcaaagtatttcttaaaagttttaatgcaggttctaattttgtttcaacctcttgatataatgcaacgtgcatagcagttgggaatgtatcattcgaactttgagatttatttacatcatcatttgggtggatactttcatcactttgatgatcttttaaatacatattagcaacataacttactacttcgttcacattcatattactttgtgtaccgcttcctgtttgccatacaactagtgggaagtgttcatctaattcacctgataaaatttgatcacatgcgtatacaatggcatctttctttgcctcgcttaattttcctaaatcaaaattagctattgctgctgcacgctttagttgtgcaaaaccataaactacttcgattggcatacgctctttaccaactgggaaattacgtttacttctttctgtttgagcaccccaatatttatctgcaggtacttctatttctccaaaagtatcatgttcaattcttactgacattcaatttctccccttatcactgtttatttaactgtagtatatcattaaataatttaattgagcaatttatgattaaaacgttttcataatttgaaataaaaatacactaatcgcacgtgttcaccctttattacagtgatacggtcatacgattagtgtgttatctatcattatttagttattattgaactaagtttaattacgatactttgttttagtagcttcaaccgtagcaatagctgtaagtatatataatacagcactaacaattgtcgtatatggatttagagcaacaagcgtacctaaaactcctgttaaactcgcataaaacccatcaagtgtataatacaatattgctgttattaataaacaacaaattacactgattacaatacctgattgattacttttaatgaatgtttgcgcattaacatcatcaattaatccttttgataaattgagttgtaattttattactttgaaaataacaggtaaatataatgccccaattgccaatggaaaagctttaattgatattaaacttataataactgttgctatcaataattgaatccagtattttcctaacataaatatataaatctcctctaatttcattcttcaatagcatatcataatcttggcatattaagaaacgcggtttaatgatttcattaaaaatattactgatagatgacttctttcaattatgtctggagtaattaattatcaattccgtttaaatggtgttttaatatttaaaattgaacttttgatatattactatgtctggtacacaaatcaatgttttatgctttacaaagttatattggcagtagttgactgcagtccacaacatagaggcttcggaatgtcagcttctatttcatgcaagttggtggagctccaacatagtggaattggattcccaatttctacagacattgcaaattggggaaacgggccacaaactcagaaactggtggaaagtcagcttaaaataacatgcaagttggcgaggccccaaaatagtgagatcggatttctaatttctacagacattgcaaattagggaaacgggccacaaactcagaagttggtggaaagtcagcttaaaataacatgcaagttggcggggccacaacatagaaaaattggatcctcaatttctacaaacaatgtaagttggggaaacagccccaacactgaaactagcagaaagtcagcttctatgaatataataaaaaagctaggtaacaaaatgctacctaacttcatattcaagataatcaatcctatttgatatatgttctatactatacattatttacatgataaataactgaatattacacaattataatactttactgactgtcttcttcagaattcttttcttgatcattttgatcagagatttgttccatttctttacctaattcttttaaatcttcaaaatccgttaccatactgttttcttcttcatgataatttaattttggatctttgtctttagacataatcaatacctcacagatttttaattaagcaaagcgtgacgtaaagtaagctttaacatcttcaggtaaacctgcagccgcttctttatcaagaataacatttaccattctatgtgcttttaaatcggctggttcgaagcttgttttaccattttcttgatataatttttcaactacatctcgtttattagcacctgtcactactaagaaaatttctcttgcttccattagtccttgacgaatactaacatttaacttaccttgctcatcgatagaaacaacttgtaatgttaatttccctttattttctttagttttaatcttatcagcgattaattcgattgcatctttttcataagcaattggataaacttgacctgctggtacacctaacgcttcgaaatatgattttttatcgtcataatctaaaatatttatttggctaaaatcaacagcatgtttttcaacatttttctttaattcatctagaactggcgcttgatctgtatctaaatgaaaacctgcaattgtagtaggattattgttaaattgctttctaataatatcagcagcatattctgctacaagttgactattgtcaaagactttaaagttcattgccatgatttctacactcctcttagtttgcattttacataaaaacggcgatattaataattattataccctaactttcaatatatcaaaccatttaactttaacatgcttatactctaaatatagcacttaagcatcatttttataatgaaaatgagtaaattttaattcaatcccggaaaatcttgttgacgtaacgcttcataaattaacaacgcagcagtatttgataaatttaatgaacgaatatgttcactcataggaattcttaacgctgtgtcttgatatttctctttcacccagtctggtaatcctgtcgtttcttttccaaaaatgaagtaaaaatctttgtcatgatttgaaaaatcaaaatcactataagtctttttaccaaattttgttaataagtaatactcgccatttgtgacttcaaaaaatgcttcaatactatcatgatacgtaatattcacaaattcccaataatctaaaccggctctttttaacattttatcatcagttctaaatccaagaggtttaattaaatgtaaatgtgtgtttgtacctgcacacgtacgtgcaatgttaccagtattagctgggatttctggttgatataaaacgatatgatttgtcatattactattctctccttgtgtctaatccttttatcatttcattctgaacttctgcatcctcttgatcataattagcattgataaaatctcttgcttcttccccaagaatttgaccaatggcccaataagcagttgctcgaatcaacggtctttcatctgttgttgcaacttttttcaattctggaattgcatccacttcattaaaatgcgccaatgctaaaatagcatttcgttgtatcggctttttaccacgccaagcacctgcaaggtgaccatatgtttgtttgaattctttattagacatacgtagtaaaggtactaatcttggctttaaaatttctggttccaaaatgatgtcatcttgttcggtattaatacctctatttttcggacaaacttgttgacacgtatcgcaaccatataatctattcccaattttataacgatattggtcaggcatatagccttttgtttgcgttaaaaaactaatgcatttctgactatttaattggccatttccaactaatgcacttgttggacaacgatcaacacaaattgtacaatcaccacagctatctaataatggatcatcaggttcaaaaggtatactgactaacatttcaccgaggtatgtccatgttcctagtttaggattgatgacaaagccattacgaccaacaaatcctaaacctgcacgttctgctactgccctatctgataatacacccgtatctaccatagatttgatttcaacatctggaactttagattcaataaatgcagctaacatgtctaatcgtttacgcataattgtatgataatcttgaccccacgatgctctagcaaataagcctctgcgatcacctctaacactcttaggtgcacctttcagtttgttaggataaccaactgcaattgctatgattgaccttgctgttggtaaggataatttaggctccgttcgtaaagcaatatcagattcttcaaatcctgaggcataaccatttgcatgatatgcttctagcttttgcttcaattcatcaaagggatcggcagtagtaaatccaatactgtcgataccaattgtatatgcatagtcaatgatatcttgctttaattgctttgtatccaatcgtatgccccccataaaataatactatgttattttaacacaaccattattcatattgaggtttcatttcacataattttaataataaaaagcttgaatatatgatataactttgtggtgcgtatcatatattcaagcttcgttaggttgttataatactcttgctaagaaattttgtgttctttcatgttgcggttgttcaaatatttcgactggtgtgcctgactctacgacaacgccatctgccataaatatgactttgtcacttacatctttggcaaatcccatttcatgtgtcacaaccaccatggtcataccttctttggctaggtctttcattacttttaatacatcaccaactacctcaggatctaatgctgaagttggttcatcgaataaaataacatctggatgcattgctaaagctcttgcaattgctaccctttgtttttgaccacctgataattgattcggatatacatctgctttttcttttaatcccactttatctaataacgacaatgcttccttatgtaattcatcgttattatctttctttaataatttaggagctaaaataatattatcgacaacttttttatgtggaaataggttgaagttttgaaataccatacccattttttgacgtagtttatctacttgtgtccctttttccgttaagtcattgccttcaaaaatcacttgacctttagtaggtacttctaataaattcatacatcttaacaatgtacttttaccactaccagatggacctattattgctactacttccccttgattgatttcaagattgatatcttttaaaacttcattatctccaaaaactttattaagattgtttattttaatcactggcattcaatctcccttcaatcatgttcataatgcgtgtaagtacaaatgttaagacaaagtataatgctgctgccactattaatggtgtgaatgggtcaaatgaaataccttgaaccacttgtgcattaaacataatttcgccaactccaattgttgacacaatagatgattctttaattaaagtgacaaattcattacctaaagctggtaaaatatttttaattgcttgtggcataattacacttttcatcgtttgtctataattcaaacctagactacgtgcggcttccatttggcctttatcaacagcatttatacctgcacgaataatttcagcaatgtaagctgaggaattaataactaatgcaattgttccacaaacaagagctgaaatgtctagtcctaatgcagcagttataccaaagaatacgataaatacttgaactaacattggtgttcctcttaatatttcgatatagatagaagcaatccatgaaataatttttattttacttaatttcattaacgcaacgaatgcacctaaaatagaacctaatgcaacaccgataagtgaaattaatattgtaatcttaattcctttcaagaaaaaactaccatacttagaaataaaaccactgtcatcattcatcgcatttgcagcattagtcatatatttatcgattaatcctttatctttaacctccttaatcgttttattaatttgtgacaataattttggtgaatcttttggcactgctatcactgtatctttttcttcttcattaaatttcacattggaaattcctaatttaggattttgttttaaatatgcttctgctacaggtttttcaactacagcaccttcaacctttccacttttcaatgctaatataacgtctggtaaacggcttaatgaagtaatagatgcattttcaatttcggtttgagcgattttttcttgttcagttcccttttgtgcccctacttttttattattaaagtctttgatatctttatattcattaactttatctttctttacaagcatgatatttttagtcatcatatatgaatctgaaaaatcaacttgcttcttacgttcaggcgttgaagtcattccggaaataataatatcaatttttccagttttaagagctcctaacaaactatcaaatgacatattgacgatttttaattttaaattattatctttcgcaatttttttagctaaatcaatatctacacctgcatactcagtcttaccattaactgtatgctcaaattccattggtgcataatctgcagaaagacccactctaagttcaccgcgttctttaatcttctcccatgtttgatcttgttcagcatgtgctgtgggattgatatacaccatagcactgctaattaacaaccctaatactaatataaacctaattaaacacttcatttatacagccctccctaattaatattcataattatacatattaatacattttgatgcaatagtgttttataaatgtatttttatcaatataaagaaaagcttctttttaaaagactgtacataaaaaatccgctattatacgtgaacaaatctcacattttaaaatcaatcaaaaaagcgctactatcaatatcttattgacagtaacgcctatatttatcatatattaaaacttattcttgtcatcaagctataaattattgttttggaacttcaaatttataaatatcattagaatatataggaatgaattttttacacaattcatgaacaataaatgccgatacaaatggtatgacaaaataaccaagtgctaataaaataatattcattgttggatcacctgacattcggttaaatgcatttattgggccaactaatcctgtatatccaaatccagcagacaatggtgttcctttaacctgaagaacgtaagcaatgattccagtaattattccatttatagtcaatggtatcgaaataattaaatttttcaagtaaactgggatcatcatttttgcagctcctatgagtaaaactgcatttacaccaatagaattgacacgcaatgagccaaataagaaagtaacacaggcagccactatacctaggtttgctgctccacttcctagtccgtttaaactaatcgcagttgcaatcgctactaacgatattggtgttaccattaataatgaaaatgccacactaataagtatagacattaacaacggatttaagtctgtaaaagaatgaattacatttccaattgcttgagtaatttttcgaatgtaaggtaatgtgattagaccgatacccccactaacgataggtactaaaactggtaatataattaattcaaaagatccaagtttgttttgtaataccatatatataagacatgcaataataacaaccaaactcgtatttataatgtcacctataccttttaacataaaactattattgctatatacaacagcacctgaaccaatcatagctgatgtacctactatagcagcacctgcaccattaaatttaaattgatgagcagctaaaaccccaataataaatgccataaatgattgaattagtatcactaactgatacgttaattctaaaatttcattaccacttttaaatatttttaatacttcacctaataaagcattcggaacaagtgcaataacaacaccagcaccaatagaatttaaaatcttactgaaaaactgtttattatcagcattatttgcgttactcataaacgacctccaatttgaacattaaactcatcatattatagaaaattaactttaacaatgattagttggctaatttaatctaaatataacaatccacaaattgaataaagcaaatttaaacaatctactcactaatcaatgtcatgttaattttaaaatactactaattacatcctgtgactaataatgtaataaattgtaaatattaaaatagccatattactattaagatagataaattgaatcgacttggtataaagcacaataaaatagcacttttacaaatatattattagaaaagttgaaacaaatatataaccccagataatataatcattatcattaatgtaataccaaaaaaagaagttaaacaggttcttcatcttttatggtgggaaggtaaaacttcctgctttttttaatacacaaaaagcgcaattgcctctataatttaaagtgaccaaacccaaactaaaggagacaagtgcgcctatgtgtaatgataccttagaattactaagaataaaagatgaaaatataaaatatataaaccaagaaattgacgtcattatcaaaggaaaaaaagcaacagtggttaatgctgtactaacgtataagccttcggcctgttattgttgtggagttaaaaatgaaggacaaattcataaacatggtaagcgtgtttctcgtattactttacttaaaactcaagggtataacacatacctcaacttagctaaacaacgttttaaatgcttagaatgcaatggcacttttactgctaaaacgtcaattgttgatgagtcgtgttttatctcaagatgtgttactcaaaaagttatagaagaagctactaaagttaaaacagagattgatactgcagaagataactgtatctctccatctactgtaagtcgtattagaactaaagcggctaattcattacgaattaaaccctttaattgtttgccagaacacatcgctatggatgaatttaaaagcgttaaaaatgtaactggatcaatgagtttcatttttatagataatgatactcatgatgttatagatattttagaaaatagaactacaagattcttgcgtgcctatttcgagcgattcgatttaaaaaatcgacaacaagttaagacggttactattgacatgtatgaaccctatgtccgattatttcgcgacctatttcctaatgcagctattatttttgacagattccatatcgttcaacatttaaatagagaacttaataagtatcgtgtacaagttatgaatgaataccgtaataaaaaaggacctgattatacaatttttaagaataactggaaagtcctattgatggatactagtaaaaccatatttagtaaatacagatggaataaatcttttaaggcttataaacgctcatctgacattgtagaattcatgctttcaaaagacgatatactacgacactcctacgaacttgtccaaggattacgaaaagacctaaggttatgtaattggcctaaatttattaatcgtttaaattcagttagtaaaaagtctgtgagtaagggtgtatggaaagtggttaaatattatagaaaacatcaaaggatgttaagaaatacaatttattacccagcatttaataatggtgctatagaaggaattaataataagataaaattaatcaagtgaatttcttttggttacagaaatttcaacaactttaaagcacgtataatgatgattttcagcttgtacaaaggagaaaaaaagaagacaaccaagcccaataatggactggccgcctaataataaaaactctaaaagttgtattttaaaaatagttctttaaattatatacccaccacatttggtggagaaccgttaaacaatgcatagttgcttaacttccaatattgaactcatcattacaatttgacatagagtctattaaagcgtgtgccatttgagtccacttttatttgtattgtatagagagaaataaaaagaaaccttgttttacaaggtttctaatacgttatgttatgtaaataacagttaattataccggtggtcggggtcgaaccgacactccacaagtggaacgggattttgagtcccgcgcgtctgccaattccgccacaccggcttaatggtaaacaaaaaacttccctttggaagcaattatggagcggaagataggatttacacctatacctcgttccgggaaggaacgtgttctaaaagttgaactactcccgcaaatattaaattatggagcggaagataggatttacacctatacctcattccaggaaggaatgtattctaagagttgaaatactcccgcattattattaaattatggagcggaagataggatttgcacctatacctcgttccgggaaggaacgtgttctaaaagttgaactactcccgcataaacctggaggcggcaaccggatttgaaccggtgataaaggttttgcagacctctgccttaccacttggctatgccgccaataactgggctagctggattcgaaccaacgagtgacggagtcaaagtccgttgccttaccgcttggctatagcccattaataataagggcggctgaaggggatcgaaccctcgaatgtcggaaccacaatccgatgtgttaaccacttcaccacagccgccatggcaggggcagtaggaatcgaacccacaccaaaggttttggagacctctattctaccgttgaactatgcccctattaaaaataataaatggaggggggcagattcgaactgccgaacccgaaggagcggatttacagtccgccgcgtttagccacttcgctacccctccataaatggtgccggccagaggacttgaacccccaacctactgattacaagtcagttgctctaccaattgagctaggccggctaagaaatggttcaggacagagtcgaactgccgacacatggagcttcaatccattgctctaccaactgagctactgaaccataataaaaatgtaatgatggcggtctcgacgggaatcgaacccgcgatctcctgcgtgacaggcaggcgtgttaaccgctacactacgagacctataaaatattgcgggaggcggatttgaaccaccgaccttcgggttatgagcccgacgagctaccgaactgctccatcccgcgataataaaaaataatggcggaggaagagggattcgaacccccgcggcccgttaaggccctgtcggttttcaagaccgatcccttcagccggacttgggtattcctccattattataggtaaatcgctattaattataaaattaaatggcggtctcgacgggaatcgaacccgcgatctcctgcgtgacaggcaggcgtgttaaccgctacactacgagaccattagtaaaacggaggaagagggattcgaacccccgcgagccgttaagcccctgtcggttttcaagaccgatcccttcagccggacttgggtattcctccaaaattatatggaccttgcaggactcgaacctgcgaccgaacggttatgagccgttagctctaaccaactgagctaaaggtcctaaatataattttacaactaataaatagtggcggtggaggggatcgaacccccgacctcacgggtatgaaccgtacgctctagccagctgagctacaccgccttatatagtttgtaaataatatggtggagactagcgggatcgaaccgctgacctcctgcgtgcaaagcaggcgctctcccagctgagctaagcccccataataattacagtatatcgggaagacaggattcgaacctgcgaccccttggtcccaaaccaagtgctctaccaagctgagctacttcccgtataattaacgcgcccgataggagtcgaacccataacctcttgatccgtagtcaaacgctctatccaattgagctacgggcgcatatgtttttattgaaaatggtgccgaggaccggaatcgaaccggtacggtgatcactcaccgcaggattttaagtcctgtgcgtctgccagttccgccaccccggcactataaaaatggagcagaagacgggattcgaacccgcgaccccaaccttggcaaggttgtattctaccgctgaactacttctgcatatgcgggtgaagggagtcgaacccccacgccgtaaggcgctagatcctaagtctagtgcgtctgccaattccgccacacccgcaaatggtgagccatagaggattcgaacctctgaccctctgattaaaagtcagatgctctaccaactgagctaatggctcttccatggtgccggccagaggacttgaacccccaacctactgattacaagtcagttgctctaccaattgagctaggccggcaatatgtaagaataaatggtggagaatgacgggttcgaaccgccgaccctctgcttgtaaggcagatgctctcccagctgagctaattctccgatttaaaactgcctggcaacgttctactctagcggaacgtaagttcgactaccatcgacgctaaggagcttaacttctgtgttcggcatgggaacaggtgtgacctccttgctatagtcaccagacatatgaatgtaatttatacattcaaaactagatagtaagtaaaagtgattttgcttcgcaaaacatttattttgattaagtcttcgatcgattagtattcgtcagctccacatgtcaccatgcttccacctcgaacctattaacctcatcatctttgagggatcttataaccgaagttgggaaatctcatcttgaggggggcttcatgcttagatgctttcagcacttatcccgtccacacatagctacccagctatgccgttggcacgacaactggtacaccagaggtatgtccatcccggtcctctcgtactaaggacagctcctctcaaatttcctacgcccacgacggatagggaccgaactgtctcacgacgttctgaacccagctcgcgtaccgctttaatgggcgaacagcccaacccttgggaccgactacagccccaggatgcgatgagccgacatcgaggtgccaaacctccccgtcgatgtgaactcttgggggagataagcctgttatccccggggtagcttttatccgttgagcgatggcccttccatgcggaaccaccggatcactaagtccgtctttcgaccctgctcgacttgtaggtctcgcagtcaagctcccttatgcctttacactctatgaatgatttccaaccattctgagggaacctttgagcgcctccgttaccttttaggaggcgaccgccccagtcaaactgcccgcctgacactgtctcccaccacgataagtggtgcgggttagaaagccaacacagctagggtagtatcccaccagcgcctccacgtaagctagcgctcacgtttcaaaggctcctacctatcctgtacaagctgtgccgaatttcaatatcaggctacagtaaagctccacggggtctttccgtcctgtcgcgggtaacctgcatcttcacaggtactatgatttcaccgagtctctcgttgagacagtgcccaaatcgttacgcctttcgtgcgggtcggaacttacccgacaaggaatttcgctaccttaggaccgttatagttacggccgccgtttactggggcttcgattcgtagcttcgcagaagctaaccactcctcttaaccttccagcaccgggcaggcgtcagcccctatacatcaccttacggtttagcagagacctgtgtttttgataaacagtcgcttgggcctattcactgcggctcttctgggcgttaaccctaaagagcaccccttctcccgagttacggggtcattttgccgagttccttaacgagagttcgctcgctcaccttagaattctcatcttgactacctgtgtcggtttgcggtacgggcacctattttctatctagaggcttttctcggcagtgtgaaatcaacgactcgaagactcaatgtcttctccccatcacagctcagccttaacgagtaccggatttgcctaatactcagccttactgcttagacgtgcaatccaatcgcacgcttcgcctatcctactgcgtccccccatcgattaaaacgattataggtggtacaggaatatcaacctgttatccatcgcctacgcctgtcggcctcagcttaggacccgactaacccagagcggacgagccttcctctggaaaccttagtcaatcggtggacgggattctcacccgtctttcgctactcacaccggcattctcacttctaagcgctccacatgtccttacgatcatgcttcaacgcccttagaacgctctcctaccattgtccaaaggacaatccacagcttcggtaatatgtttagccccggtacattttcggcgcagtgtcactcgactagtgagctattacgcactctttaaatgatggctgcttctaagccaacatcctagttgtctgggcaacgccacatccttttccacttaacatatattttgggaccttagctggtggtctgggctgtttccctttcgaacacggaccttatcacccatgttctgactcccaagttaaattaattggcattcggagtttgtctgaattcggtaacccgagaggggcccctcgtccaaacagtgctctacctccaataatcatcacttgaggctagccctaaagctatttcggagagaaccagctatttccaggttcgattggaatttctccgctaccctcagttcatccgctcacttttcaacgtaagtcggttcggtcctccattcagtgttacctgaacttcaacctgaccaagggtagatcacctggtttcgggtctacgaccaaatactaaacgccctattcagactcgctttcgctacggctccacatttactgcttaaccttgcatcaaatcgtaactcgccggttcattctacaaaaggcacgccatcacccattaacgggctctgactacttgtaagcacacggtttcaggttctatttcactccccttccggggtgcttttcacctttccctcacggtactggttcactatcggtcactagagagtatttagccttaggagatggtcctcccagattccgacggaatttcacgtgttccgtcgtactcaggatccactcaagagagacaacattttcgactacaggattattaccttctttgattcatctttccagatgattcgtctaatgtcgtcctttgtaactccgtatagagtgtcctacaaccccaacaagcaagcttgttggtttgggctcttcccgtttcgctcgccgctactaagggaatcgaattttctttctcttcctccgggtactaagatgtttcagttctccgggtgtgccttctgatatgctatgtattcacatatcgataacatgacataactcatgctgggtttccccattcggaaatctctggatcaaagcttacttacagctccccaaagcatatcgtcgttagtaacgtccttcatcggcttctagtgccaaggcatccaccgtgcgcccttaataacttaatctatgtttccaccatttttataagtcaaacgttaacatgaagttacgttcttttataaaaagatttaaacgcgttattaatcttgtgagtgttctttcgaacactagcgattatttcttatgaattcaagcttatttaaaactctttattcactcggttttgcttggtaaaatctatattttacttacttatctagttttcaatgtacaaataatggtggagactagcgggatcgaaccgctgacctcctgcgtgcaaagcaggcgctctcccagctgagctaagcccccaaataggtattaaattaatggtgggcctaagtggactcgaaccaccgacctcacgcttatcaggcgtgcgctctaaccagctgagctataggcccattaatttgaatgaacaaacattcaaaactgaatacaatatgtcacgttattccgcatcttctgaagaagatgttccgaatatatccttagaaaggaggtgatccagccgcaccttccgatacggctaccttgttacgacttcaccccaatcatttgtcccaccttcgacggctagctcctaaaaggttactccaccggcttcgggtgttacaaactctcgtggtgtgacgggcggtgtgtacaagacccgggaacgtattcaccgtagcatgctgatctacgattactagcgattccagcttcatgtagtcgagttgcagactacaatccgaactgagaacaactttatgggatttgcttgacctcacggtttcgctgccctttgtattgtccattgtagcacgtgtgtagcccaaatcataaggggcatgatgatttgacgtcatccccaccttcctccggtttgtcaccggcagtcaacttagagtgcccaacttaatgatggcaactaagcttaagggttgcgctcgttgcgggacttaacccaacatctcacgacacgagctgacgacaaccatgcaccacctgtcactttgtcccccgaaggggaaagctctatctctagagttgtcaaaggatgtcaagatttggtaaggttcttcgcgttgcttcgaattaaaccacatgctccaccgcttgtgcgggtccccgtcaattcctttgagtttcaaccttgcggtcgtactccccaggcggagtgcttaatgcgttagctgcagcactaaggggcggaaaccccctaacacttagcactcatcgtttacggcgtggactaccagggtatctaatcctgtttgatccccacgctttcgcacatcagcgtcagttacagaccagaaagtcgccttcgccactggtgttcctccatatctctgcgcatttcaccgctacacatggaattccactttcctcttctgcactcaagttttccagtttccaatgaccctccacggttgagccgtgggctttcacatcagacttaaaaaaccgcctacgcgcgctttacgcccaataattccggataacgcttgccacctacgtattaccgcggctgctggcacgtagttagccgtggctttctgattaggtaccgtcaagatgtgcacagttacttacacatatgttcttccctaataacagagttttacgatccgaagaccttcatcactcacgcggcgttgctccgtcaggctttcgcccattgcggaagattccctactgctgcctcccgtaggagtctggaccgtgtctcagttccagtgtggccgatcaccctctcaggtcggctatgcatcgttgccttggtaagccgttaccttaccaactagctaatgcagcgcggatccatctataagtgacagcaagaccgtctttcacttttgaaccatgcggttcaaaatattatccggtattagctccggtttcccgaagttatcccagtcttataggtaggttatccacgtgttactcacccgtccgccgctaacatcagagaagcaagcttctcgtccgttcgctcgacttgcatgtattaggcacgccgccagcgttcatcctgagccaggatcaaactctccataaaaattatgatgtttgattagctcataaatactaaataatgtttgtaacttatagttacgtttttggaattaacgttgacatattgtcattcagttttcaatgttcgtttgtcacttacaagatttaattataactcgtaagtttttgtaagtcaagaattatttttaattattttatttctaaaaaataaatttcctaactcaattaattcaacaaatattattttaatatgtatttgttcgaatttcaatagtcaaatttacactttattaatattttaaatcaacaacttaaaacatttgttttttaaatattagtgccgtttgacgacttttatataatatcaagttattctagtagagtcaacataaaacaacacttatttttgtttaaaaattactgttgaagggattattttctattcgtaagtactatatgtatttaaagtgtaattccttatgctttttacttcagttttacaaacaaacttatactcactttatggatagttatttagtagaccttcgtttgaatatttttatgtttatttataaaggatactagttattagttaataccacttccgtagttagaatattcttttcttcaatttaaatatttttcagaataagcataaaaaaagttaaacaactttcatgtcgtttaacttcttaaatattacgcttacttatatgaagtaagctaacgcttttttaatttgtcatactaccaaagttaaattatttatcttggcattctttacaaactccataaatttccattcgatgatgtgttacgtcaaagtcagtcatatgctgagctaatctttcaatttcatttaactgtggatattgaaaatcaacaatcttaccacattgttcacatataatatgataatgattatgtgtattaaagtcgaatcgacttgatgagtctccatatgttaattcttttacaattccaatatctttaaacactcttaagttattatatattgtcgcaacacttatatttggaaaatcaggtgaaagtgcttgataaatttcatcagctgttggatgagtatgtgaagaaattaaataacgtaatattgcttgtctttgaggtgtaattcttacgcctgcttgtcgcaatgatgcaattgattcttctagttcatgttcaattgattctatttcaacactcatctatatcaccatctttcttatataataattattattacttactataaatataactgtagtattgcgcgcgtgtcaatatttacatgatgatttcatttaatagccttttttagcatcaacttcattctcaattagaccattcttattgagaaaattaactagattgtttttaaaaatatctaataagtcatactttgcttcataatcattaccagttatatgcgctgttatagttacattatccaattcatataattcatgattaggtttcaaaggttcattttcaaacacatctaaatatgcatgtcgaataactttactttttaatacttctattaagagcgcttctttaactatgctacctcgtcctatatttataaaaagtgcttcatctttcattaattcaaaatgttttttctttagtaaatgaatcgtttcttgcgtttctggtaaagcatttataataatgtcagcatttggtaatgtgctttcaagtgattcgatagtatatatctcgtcaaactcatctttgttctgacctgacttgctcagaccaattaaattcatattaaaagcctttgctaacttcgcagttctagtagcaattgcacctgtacctaaaaataaaactgtttgtcctgataggcgtttaccagttattttcgaatcatatatatgttgtcgttggttatcatatgatagtttcatctttttataatcatctaaaatgaaagctaaaatgtattcagataattgtttagcttgaacaccttttccattagttaaaagtatgccgtgatctgcaatataatctaacggcaatgtatttacacccgttgcaaaccatgcaatccattttaaattcgggcaacgtcgtaaaaatgcctcattgataccgccatcataaccaactaatatatctaaatcagccaagtcgctctcaggtatttctgatgcttttttataaaatttaaaatctaaatctgaaaagcgttgttgtaattcagtttcaacttcacgcatacgatttaacccaacaactttcatatatgtcaccccaaaatgtttttaagttcttctatttgtgttttaaccttaaccttctcgataacatctaatactttaccttgttcatctattataaaagtcgttcttacaatgcccatactttctttgccaaatgatttttttaactgatatacgccagtttctttagctaatttaaaatcttcatctactaataaatcgaaattcaatccgtgtttctcaataaaattttggtgttttttctttgaatcaccgcttataccatatactgcaacatctaaatcattgaacatttctaaattgtctctaaagtcacaagcttctgtggtacaagtaggtgtattatctctaggataaaaatatataatcgcctttttaccttttaatgtatcatttgtaatgacagttccgtcttgattttctaatttaaatattggaaattgttctcctttttgcaacatataatcacctttttcttcattataataattttatgatacgatattagatgaaaatattaaattaaaagaggttgatataaatgaattttagtgaaagtgaacgtttacaacaactttcaaacgaatatattctaggcggtgtcaattccccttctcgttcttataaagctgtaggaggcggtgcacctgttgttatgaaagaaggacacggtgcatatttatatgatgtcgatggcaataaatttattgattaccttcaagcatacggtccaattattacggggcatgcacatcctcatattactaaagcaattcaagaacaagctgctaaaggtgttttatttggtacaccgactgaattagaaattgaattcagcaaaaaattacgtgatgcaattccatctcttgagaaaattcgctttgtaaattctggaacagaagcagtcatgacaacaattcgtgttgcacgtgcatatactaaaagaaataaaattataaaatttgctggatcttatcatggccattctgatttagtattggttgcagcaggtagcggcccatctcagctcggttctccagactcagctggtgttccagaaagcgtcgcacgtgaagtcattactgtacctttcaatgatattaacgcctataaagaagcaattgaattttggggtgatgaaattgccgcagtattagtagaaccaattgttggtaactttggaatggtaatgcctcaacctggatttttagaagaggttaatgaaatttcacataacaatgggaccctagtgatttatgatgaagtaattactgcattccgtttccattacggtgccgctcaagatttattaggtgttatccctgatttaactgcatttggtaaaattgttggcggtggtttaccaattggaggctatggtggacgtcaagatattatggaacaagtagcacctctaggacctgcatatcaagctggtacaatggctggtaacccgttatctatgaaagcaggtattgcattactcgaagtactagaacaagacggtgtttatgaaaaattagacagcttaggccaacaactagaagaaggtttacttaaattaatcgaaaaacataatatcacagctacaattaatcgtatttatggatctttaacattgtactttacagatgaaaaagtcacacattatgatcaagttgaacattctgacggcgaagcgttcggtaaatttttcaaattaatgttaaatcaaggtatcaatttagcaccttctaagtttgaagcttggttcttaacaactgaacatacagaagaagatattaaacaaactttaaaagctgcagactatgcttttagtcaaatgaaataacttttaaggaagtatatttttaattgaattaaaataaagcaaatgctcacatagtagattcattttatatcgttaactattaacgtttaacttgatatgtcactatgtgagtttttattttacaaatttatactattttaatctctgactaaagttttacatcgctatcagtattatgtatgatttattttaacaactataaataagcttgaattttgtaactagtaagtgtataacagtaatgaatacgaatattagatattcaataaacttaaaaggggcgtcattatttttgagactaggagctcggatttttaaaactggtatagccattattttagctatgtctatcgcttctttactaccggatgatgttggtctgaaagccttagctggtgtcagtgctgttgttgcaatgcaacctagtatttatcgttcatttaaaacagtttctgatcaagcattgggtaacattataggtgccatactatctgttacaatggtaacaatttttagtgataattttatcattatgggtgttaccgtcatagtacttattgctattttatttaaatttaatttagcacatgttgctactttggcgagtgtaacagcattaatcattatgggacaacataccggttctttctatattaccgccttttacaggtttgtacttgtaatgattggtgtcataagttcatctctagttaactttgtgtttctaccacctaaatttgaaacaaaaatttactataattcattaaatatatcctcagatatttttatgtggtttaaattagtattaaatgatacgacggagtttaataatattaaacaagatagtcataatttaaaacaacgtgtcgaaaagttagagaaaatttatgattactatagcgaagaacgtcctattacaaaaaaacatattcaccaacagaatagaaagaaaatacttttcagagaagtagttcagacgactagacaagcttatgaagtattaaacaaattgtcgcgttatcaaaacgacttatatttacttaataacaatttcctattacaaatcaaattagatttagattcattaactgcttttcacgagcaaattttagctagcctttctaaaaaagcacgttataatgtgacacatgttgattatgagttagataatccgcagaaaaaagatttattgtccacatttcagcatgagttaataaatcatccttatcaaacggaatattcgtttgccaatgttatgcaaattgttgcagccatcgaagagtatcgacaccatttagagcatttagaccgcataagaattagctttttcacatatcatagatctgatgcagacattgaaattgttgaagaagactttgatttataacattaaaacaattttatcaattaatgccacaatgagataaactaatattgaatctcgaaattaaatttaaaaaagcagtaagattattttcaattaagaaaatctcttactgctttttctatgttatgaccccaccatcctgttacaaattttctcttcaagattgtactgaagtcaaacaactaatactttataagttttgaatgctatataaatgctcgtaagcaccttgttttgcaatcaattcacgatgcgtacctgtttcaacaatatgtccattttcaattacgacaattttgtcagcatgtgtaatagtggacaagcgatgcgctacgataagtgtcgttcgatctttactcaacacatctaatgcttcttgaataatggattcactttctaaatcaagtgcacttgttgcttcatccaagataagaattggcggattatttaaaaatattctagcaatcgataatctttgtttttgaccacctgataatttaacacctcgttcacctacttcagtgtcatatccctgtggcaagttcataataaagtcatgtgcattagccattttcgccgcttcaactacttcttcatctgttgctgttggacgaccaagtaaaatattttccttaactgtatcagagaataaaatattatcctgttgcaccaatcctatttgatttcttaaacttcccgttaaaaaatctttaatgttgtgaccatctattaaaatttgcccagaagttacatcgtaaaatctcggtattaagttaattaatgttgatttaccaccaccactcatacctacgaaagcaactgtttctcctttttcaatactcaaattaatatcttttaaaattggagcttcgttatcgttatattgaaaactaacatgatcaatatcaatacgaccttgtttaatttcaataggttgagcaccaacaccatttttgatgtcataatcttcatcaattaattggaatacacggtccattgaagcaaaactttgcgttaaagttgtaaatgatgcgactaaacgacgtaaaggcccgaacaataactctaagtatccaacaaatgctgcaagtgtacctactgtgattgatccagaaatagcaagatatgcaccaacaccgatgacaataattggtccaatatctgtaactgtattaattgcggcaaaggaataggcattccatcttgtatgtttcaacgcacgtgttaggaaattagtattctttttatcaaagtttttcgcttcattgtcttcaatcgcaaaacttttaacgactgaaataccttgaacacgttcatgcaagaatccttgaacctcagctaatgcttgagatctttcacgtgtcaattttcttaatcttccaaagaaaacgtacaccgttaaaatgtaaaatgggaagataaacagtgctgctaaagtcaatttcacatctaaaaagaacattatggatagtgcaataataattgttatacaatctaaccaaatattcattaacccggttaaaatgaaatcttttgtttgttcaacatcattaatcactctagatattacttgacctacttgattattagcataaaatctcgcacttaaagcttgtaaatggttgtataactttttacgtatatcatacaatattttattacttgtccattgcgccaaatattgacgtataaattcaattggtggtctcactattacaaaaataaataatgcgataccaatggcaatagttaaatgatgaactttttcatcagtcgttagtgcgtggttattaatcacgccatctattgcatatttaattaatagtggtataagcattggtataccaaacttaattatcccaacaataatcgttgcaaaaatacgatatttgtatggcttaacaaattgcaaatatcgtttaatcatacaatcccccctaatctattgccctatcctattcataagcataaaaatgaatagaggttggatacataatttgtagatgtaaattcttcttacaatttacatttttaaaattaagatatctcaacctctgtcatattcatgtgattaaatacgttgtcttattcgtatgttatattctattcaatttaatctatggatactgtgtccccacacgacagcaaaagttatcatacttctttacatcactaagtcaatataaatgatttaatcagtatttacactttatttgcttaatactgtctaatttttttgtaacgttctttccaaactttgataaaatctggcgcgaatgggcccttcttctgttctatccattgttgaagaatgtccacgttgcgtcttaaaataatatcaatatcatgcggataattcatttgattcatatgttgctcatattcatcttcatctaataaatgatactttccgtttggatatactttaatatctaaatcatagtctatatattttaatgcctcttcatcacaaacaaatggtgatgacaaattgcaatagtaataaattccatcttctctaaacatgcagataacattaaaccaatattctgagtgaaagtaaacaattgccggttcacgtgttatccaagttcttccgtcactttcagtcactaacgtatgatcatttccaccaatgacaacatgatcagtaccctttaatattgttgtttcagaccaaacgcgatgaatcttaccatcatgtttataactctgaattttaatgttttccccttctttaggtatggattctctgaccatactccacaccaccttctgttaatttaaccattataaattatagcatatttcagaaatagtattatataaatacatatttttacgaaataagattttactacttaataattaaactcggtaatattgctaagtactacaacagagatttacatgtcccatttaaagtatataaaatcatcacttttatatatcaacactttaactttttgacattgttattctatgagatttaaagatatcatttatactttttaaaattaatgtcactatgttttccgataatattaccaatcatcgaatgttacccatttataaattgataaatctttgacataggtacagggaatgtatattgatctcgatcacttaaatcaaaccaaatcatgtcatctggtaatgtttcaatgttaattgctcctgaaacggcgtatactttaatcttccatgttaaatgagtaaattgatgcttcaactcaaaaataggtgtttctactggttgaatgtcatgaccgattttttcagtcattttacgtctagcatgctcactttcaaacataggaaattgccacataccatgcaataatttttcgctacgcttttgcaacagatattgaccttgattatttctaattaaaaagacggattgctcaattacttttttacttacatttttagatttaacaggtaacttttcaaatgtacctttatcaaatgcctcacagttttcttgaactggacaaaataagcataatggattttttggtgtacaaattaacgcccctaattccatcatagcttgattaaacgttccagcttctgtagtaacatacggtaataattcttgttcgtacgatttcctcgtcgattgtaatttaatatctcgatagtcatcattcaatctagaccatactcgaaaaacatttccgtctacagttgctagtggtacattatatgcaatgctcattactgcagcttgtgtgtatgggccaacaccttttaacgctttaaattgatcaggatctttgggaactaagccttcatatttatcatgaacttctttaatcgccgtatgaaaatttcgagctctactataatatcctaagccttcccaatactttaacacttcatcttccgaagcttgactcaaaacttccacagttggaaatcgttcaacaaaacgatgataatagtcaataactgttttaacttgtgtctgttgtaacatgacctcacttaaccaaatatagtacggattggtcgtttgtcgccatggcatttctctttgattttcatcaaaccagtgtatcaaattttctttaaaactagactgctgatacatttataaaaccctttcctcaccaaaattaattgtctttactcataatgtttttattgtacattaaaatcatggttagtatgtaagttaatttagttatttgcgaaattggattataatagtatatataatattatgaaatgagtgaactgatatggacactgcaacacatatcgcaattggggtgggccttacagcacttgcaactcaagatccagcaatggcttctacgtttggtgcaacagctacaacccttatcgttggttcattaattcctgatggggatactgttcttaaattaaaggacaatgcaacatatatttcgcatcatagaggtatcacgcattccatccctttcacaatactatggccaattttaattacatttttaatattcacgttctttagtggaaccaacccatttcatgtatggatgtgggctcagctcgcagtatttttacatgtctttgtagatatattcaattcttatggtacacaagcgcttagacctatcacaaacaaatggattcaattaagtgtgattaacacatttgaccctattattttcacagttctttgtattggtattgtattatgggttataggcttgcatccatttgcagtcttctttcctataatcgctttactaatcatttattacatgattcgttttaaaatgagagccgtaattaagcaacaagctttaaaagcaattcaacaagagcatcaccctgttaaagtatttgttgcgccaacaataaaatttatggaatggcgtgtcgcgatacaaactgatgcacatgactatgttggaaaagcatatggtaggaatgtggtgtttagtgataaagtggaacgtcaaacattatcaacagactccattttatggaaagtcaaaggtaataaagatatacgtacttttttaaacttttcatcaatctatcgttggcaaacaacaacgttagcagatggttctactgaaattcgtttgattgatttgcgttatttaaaaaatgatcattattcatttgtggcaattgcacatgtaacaaacgataatgtcatagaccactcttatattggctgggtatttacagaagataagttacaacgtaaactgtatgctaaataatttcaagttattattcactaaagttaatctataaaaaatgaacaaccgggcagaatgaaaatcaaaacgatttttactctgtccggttttttaatgtaaaactatgaatgcttttacaaaatctaaaatttatattgttgctaacaaactacctttaatgactcgaaatatcaaaatcagtataggaaaacaatatctagatgatattctaattgtttctgattctcacagattaatttacacaacaggtcagctaaacatcatgaagaagtatccgcctcgtctgtactatcatttgaaacatcctgttgattatcagtttgtgtcactttagatgttttattataaattgcgtgtgtcgtataccttgctaatacgaaatttactgcagctattaaacataagaataaaataaagtaaaaatgatatggaatgttttccatacttgatataccaaatatgatagattgtgctataccattaacaatgtaatacattggatttagcattaggatgtgattgataaatacatgatttggatttggtatgaaaataattggtaacaataagaaacacaatacacaaaccccataaaatatgatatttattttttcagttaacagtcgaataagaccaaaagtaacggatattaatcctacaaaaatagttgccatcacaataaaatagaatagcgctatatatgatgtttcgaagtttactggtttaaccaatgcactaatcatcgtcaaaatgactagcataataaaacttaaaatagacataataactactggcgtcgctgcggaaatattaaataacttagtaactaaaaagtcattcatataatgatgataagagatataaattgtgaacatcactaccgcaaaaacaatcaatacaatgattctaaataaccatctcacctctttaacatcggtcaaatgactaaaggaaaatagcgtttcacttgcaataataagtattaaacatgcagctaatacgattagaaaacttttccaactttgttttaaacgttctgttacataccttttagtatgcggtaagtttttaaaatataaaataatattatctagcatctttacacctacaattcaatataaatccatttgtcttctttcaaattggcaatacaatatccattcccaactttagtaatccaaatgttattgttaatattaaacttatcttttaattcttttttatctacaattggataaacaaaaccgtataactgattattatcattgaaaagtaattgtatcggttgttgtgtaacggatgcaacgaaacggttatcatcatcaggaactaaagtttttataactgaactatgctttttatgtaattgactattaaagtatgcatagtaattactataatttgatttcatatatggtgctaattttttaaaactatgcgtttgatataaacctgccgggttaaaatattctaatttatctttactaacatagtaagtcttattatcggcggtaacacgataatttttactattttcgccagtaattgtaactacactatattttggaattgtgacttgtttatccccttgcatatccacactgccattaaaagcaattccataagctaacttttcgccatatggatctttattttcattttgcatcgtagcacgattcgtaaaatctgttatcgaaataattcctatattattgaaaatgagcaacatcatcaatgctaagcctaaaatagtacctgaggctaaagtccaaaaacgcactaaaaacttaggcggttttgcatgattatagcgctcaacacgtttgaaattataggtcatctctggtattcttgtacgattctttttccaatctaaatcaaagttttcaatttcttcttttgagtttagacttaatcgatcacgttcatgttctttaaaagatggaataacttgtttaagtgacccttccattcttaattgaccatgtgaaaaccaagctatgtagttactcacttgtgaaattttatcaatatcatcaccaattgacacaatcgttaaattattttcaatataatcatttgttaattcaatcgcacgttccataaattgtggtgttaaatagtcaataacatgatttaaaataataatatttgattttgatgagcgtgcaatacttaatagtaattgagcgtatgccgctttcgaaatatggttaaccggcttcgttttataatcacctaaatgtgcatattgaataatctgttcagctttatgatcattaatttcatatggaaatagttgaactaactgcgctgtataagcttcaacagtttgatgaattaacgattgatcttcaatatatccgtagaacaaatcttcagtacaaactactttacctttatcaggtttaattgcacctgccaacaattgacctaccaacgctttggaagattcaggttcaccaattatacctaatgcttctccttgataaatatgtaaactaatattgtttaaatcgatatcttcagcatcatatccaaaaggtaaataccatttcttattctgtttattcctatagtagtgtgttacttttagtaactttaaaacaattgaacttcccatctattttcatccttctataattgtaataacgctataggtaatccttcttcgggttcatcgctattaaatctaaacccccacgcaaaaataccttttaatctttctactttaaaatattgattactgccatcagtcagtttataaattttaccaatttctatcttttttctgtctactaagtaactttcggcaacaattactttactttgataaacgtcatattcatttaaaataccattcatctcagcttttctcattttctctttataaagttgtatttcgtgtcttaattctggctcagacatctcactcaatttcttctgttccatcggcaataccactttcttctaatttagctttaattttatcatatttatatccttttctcataaggccttcgatagtttttgaaattaatttctgttgcgtgtacttctttcgatttttattataaattttttctaaatctcgttgtaataaatcgtctaaaaccgcttcatcttgtgtaaaatccatttcattcaatacagcatgaatggtttccatttcaaaccctttttgaattaaagattgcattactttttctttaactttattttgtggccctttttttgttttagatattttttcagcaatttggataatatcatcaagttcctgttgttctctataaagttctgtaaatatttcaatgatatttggttctataccaagttgatatagtttttgttgataaattttaggtcctttatctgtcgtgcgaatcattgtattttttaaactttccgcataatcttgatggtcgattaacttttcgcgataacaatattcaatcacttcagaaatcgcttgctctgatatctcttctttttgtaaatattgtataacttctttttcagttctctttttatatgataaatattggattgctttatttaaacctatgcgataatgatcatacttttgaatctctgccatgtcagcagcttcaagttgttgccctttttttaaattaaatttgactaatgtatcaatatctatacccatttcaaattgttcgtctaaaaaaagattaaaccgttctttgtttttcttttgaacttctattttagtaatcttcggcactggatcaccccgttactttcttaagttttaatacaatactcttttattattcaataagccacttcctatagcaaatgtttaactttaaatatttttcgatgctaacaaaaaatcacactatcatcttttaaaatgaaagtgtgattacaagcaaatctgtaaaatttataaagcagaaacaattcaactttatcattatgacatttcaattaaaccttctacattatagttccaagcatcttacacatgaatgcaagtatttaacgatttaattgtgacatagcctgttgatattgtgtttcattgatataattttgttgcttcattttttctaagttcgtgcttacacgttgcgtaaaattctctgacatattattgatattatatacgctaggtgcattgactttactagctaaaatagcgctttgtaaaactgttatgtgagacattgttgtactatttttattcacggttgttccaaagtaatggtttgctgcgccctcaagcgtatattgattatccccaaagtaaatattatttaaataaaagcttaaaatttcgttcttattatattgtttttcaactcgatgagctacaaataattcttttacttttctagtaaatgaacgatcattatcataaaaataatttttgacaacttgttgtgtaatggtactaccaccttgcacatctctgtcgctaatcgttgaaaataaagctctagttgtacctttcaaatcgaatccatgatgattgtagaatcgttcatcttccattgaaataaaggcacctttaacatactctggcatgttatcagctgacacaaaactacttttattttcaatttttcttagttcatccacattatcgcgtgtagataaaaaatacatgataccaataaacaatgcgataatgattagaatggttaataatatttttaatagtattcgtttactttttttctttttcggcggtttgccaactggttgataatacgtattatagtgaggttcgtgtttcatatgctcaaaatgttcatttgagtttgagtacctatcgcttcttttcatgcgtttgctccttcttttaaaactcacttagtatataccttgagtttaccagtactatcacaaataggctacactttttgggaaaatcagtccaagggcttacaatcgtatacgccatcatacttacttttttgttttttgaaaaaattatagataaatcattgcaattttaaatattaatcatgtcaaatattgttatattttataaaaataaaagaccatccctattaaatgccaatagagacgaccttttatttgttattcatttattaaaactaaaatccatatttcatttcaaacgaaaatatataaattttaacaatcgataaccacaatacttctattgtaattgtttaacgatttctcgattaaaatcatctaaatcgtctggtactcgacttgttacaatattgttgtctacaactactgactcatcaactacatgtgcgcctgcatttgataaatctttgcgtacatttaatactgctgttaacgtacgaccttttaaatcgtctgtatctattagtatttgtggcccatgacaaatggcaaatgttggtacatcatttttagtaaagtatttagcaaatgtgccatatcgaccttctgtatctccacgtaaatgatctggtgaaaatcctccaggaattaataatgcatcataatcttctggtttagcttctgcaatgcctacatcgacagtaactttttcaccgtgtttaccaacaacttcactatttgcagtatctccaatcactacagtattaaagcctgcattctctaatgcctctttagggcttgaatattctatatcttcaaattcgtttgctagaataattgctacttttttagtcattgaaaatcacctttctatatatcattgatataattactatagacaagtaaatcagtgattaaacatacaagatataaaaaatattaagcgactgtcgcgatatctaaccctaacacatcttatgtggcatttacttagatactaatttaaccttttcttcaagctgatctaacaatccaatccattcatctatatcttcaacacgtacttcatcaggatttacatgatcgatatcctcaataaacttatttaaacgcgcttttatctgttcgattgtttgctgttcattcataaaaagttaactccttttattttgttttctttttcattattatcctaacagaaattgcgttaaagcgatataatcttagctatatttatgacattcaaattattttgacttttaaaaatccccttttcaattaactaaaattaagagataatttgttacgagtgataatacgaagtggtatcataccgatatgaaccaaatagaaagaaggaagtttaagacgatgaatagcgtcaaattgaagcaacctgttagcatttacaatgatccatgggaagtgaaatttatatacatttaaatttcatgagacaataaacgttgatttaatgcgtttttttgccttttttattttccttattttttctgttttacaacaaaatggtatcaaaaatggtatcatttgtagttattttagcttcacatattaaaacaaccacactcctaaattaataggtggtgtggttttgttggttgtgtggggataaaaataaccgcatcagttaagatgcggttatctagcaagggccacgtatttataaatacgtttagaatctcttcggcaactttgctatagacagtctatgctgttactaaattataccaccacacaaacctactcccattcaggaacacagagctttgtcgctcgtcagcaacgtcatatgaattctcagttcatgttgtggtgacactttaaacggtctgtgccagtagcgaccgagtcatttcaagaatgaccatttcacatttatattataacacttgtcgtgcgtaactgtatagtttttcagttgtatttaaagttaagttatctacttcgcgctttccttgccttaattgtgaaattacatattgcgctacgccagtttgtttgtgaatttggtaacctgttatatcacttttgatcaattcaattatttttaatttataatcactcatattatctacgtccattctttttatctaaacaataaaaatgtgtctttctcccgataaataataacaatggtaggcttaataaaaacaatattaaatacatttgttctgtcataattgaaaacctccaaataatattatattatataagtgtaaggaggagccatcaggctccaagcataatgttaatctttgttgtttggctttcggtctaggtagccgagatgccattctctaagttgttttaacacttctggaattatcagtactgccaatacttgatgttctagaagtgtttttattatgtctagcatgaggcttttcacctccttacacataatttgtaagtcatcaactaacctacaaatataattatactaaacaaatgtttattagtaaagtgttttttaaaatttgcataaaaaaataggcaagtaccgtagtacctgcctgttatctacatttaaatcttgagagaaatgttaaaaagttctagtaaaataatagcacattttatctttaaatgtaaatagaaagcaggtatgtaacgcacctgcttaaatagacatgactatgtcattctaactgatttctccccataagtcacctaatatctgattaggtggggcagaaccattccatgttctaataggcaagtaataacgttgcccctcccatgtatatcctacccaaacatgaccatcttgtaacatcacttctgtataatcacaatacccaccaggttggaactgataacccactggacaagataagaatggccccacttttcttactgtgattggttgattgccgtttgtgaatctagcactttcttccatgtagtaagtaccatatttattacgtttccatgcacttgcaactggtttaactgtattacttgaagcgcttgactcattagagacagtggcaaccggtattttaccatccatgtacgccctaatctgcttgataaagtagtctttaagttgcaaccgcttgtcttctggcaatagaccgcgagttactgggtcaaaaccagtgtgtaaaaccgaacttctatgagggcatgatgttgaagtaaattcattgtgcaatctgattgtatttctgtttgctggtaatccccattttttcaacaatctagcgcattcttggaaagttgcctgttcattttttaagaatgtcgcgttatctgcgcccattgattgacatacttcaataccgtaataatatttattacctatttgattagcggtatgccaacctacttgtgattcatctaaggcttgccaaactgtgttgcctgatacgtaactatgcgcaatgcccgcttctaatcttgataaaggtgcatttactaatccgttacgatatgcttcagcagtcgcccctttgctccctgcgtcgttgtgtataactatacctttagggttactaccacgcttaggtaggtcataacctttaaccacatctttgatgattttaagttctactgctttaggttgtggcttagctgtttcttttttaggtgcttgtgtaggagattgaactgatcgtggcgctgtctcacttttaaaattcggacggataaaccacatagggaaatcataagcatgttgtcgtcttgtaactttttcccaaccccagccgggttgttcgattccgtcagtccagccaccgcctagccaattctgctcatatacaatgatgtaatctaaagttgcttcaattacccatgcaacgtgaccatatccagcaccgtagttgctaccgaataccaccatgtcgccaggttgtgctaagaagtccggtgtattttggtatacagtagctaatccgtcgaagttgttagcgaacggaatatcttttgcacctaaaccttttagaagtaatccaaacaaaactttccaaccagcattggcataatcaaagcattgaaatccataccataagtccacattgaattgttttccctcagaagttttcaaccactctataaactcatttttagttaattttgcttgcattgtcgccacctccatgatgatactcattcacatcaaagccaacatcgttagaggcgtctgtgaaaggttgtgatgtatcatattcttttggtgctttcgcgcttaattccggcgttaaactactgtcttgtgatgatttccacgtaacttgttgttcttcttttttgctatctctaggcgcttgatatgtctgtgctatagatgaatctgagacgccttttgacgttgggtcagtaataacgccaatacctgtaagtaacgtgaggatagcgcctataattgcgctagcttgatttaattgagtagataaatctaatccgaataaatccgtgacttgcttgataaatagcaacaatgctccaactaaaccagttagtactgctttgtttttgaatctcaatttccagttaatatccatttgtttgctccttttatccaaaataaaaaaacgactaaaaattagtcgtttaaaattattcaatggtcaatgtcggagatcctgaataaacatcacttatagtgacgtacaacatccctgaaggattactaaagttgatatttttacttgcaactccgctattgactcctgatattcctaaatcacttgaccctaaattagtttgcgaaatcctcattataccgctacgtacattttctattgtcacctgataacttttattgggttcaactccatttattgtccattttgctgttgattcttctatgctatccggatatttatttttaggtaagggttttattacaaaagatgaaggctttttccatacttggatatttccagcatatacttttgtatattcttcaccttcgtaaataaacttctttacatttttaaaattaccttccataaaaatcaccctttaattaaatataacgtattcgggtctttttgatatatatagttatattcattttctgttcctgtccaaattttaaccgtcggttgagatgcgctttttagttgatataaattatccgcttgttgtttagtaaaagcttgagatgacaaaacataccgctcgtcatgattatgattttttggagcatataaatcatttagtgtttgtttgaattcctcaaaatcttctgtattaacttttgagccaatctgttgcaatacactttctgaaatagagttgttttgtattgcttctgctaattctcttaatgtgttcatagattcaggcgcgctatcaactagttcagcaatttttgtatccgtatacgttttagagtcgttgagagttgtatctttgattttttcaacttcttgcaatttattttctaacccttcaacatttgcgatattgattttgtccaataactcaggttctgctttgatatctgtatctttaccatcaatttgccacattttagtgtcaggattgattgatactacagtaccgtttttaccgggtgcgccttgttctccttttttacctgcttcaccttttgctccaggttgtcccggttcacctttatcacctttcgcacctttaaatctactttcattcttttcgatgtaagaaatgacatctttatctattttctctttaaagtctttgctcaataaatctgtcgcgttatcttttaaaattctcgtaatagcatcatctaccaatttaacatcgatttcttttgctacagcagattcaataccactatcaacgatattgaaagaaaagtttgcgacatgtattttttcttcttctttctctaaaaacagcttacagcgaacataaccagcgtgtttgataacctttttaggtatcttgtaggtaaggaaaccttttacaacatcgtcgataataaggggctcatttttgaatatagagccatcttccataaacaaatgtaatctaggtgttaagccatgtgcttttagatcgatacgaccttgtttgtcattgatacctattcttatagatgctgtattttcatcttcagtgtaaaatcgacagccaatgtcacctaagtcaacaccatcattttttattctcgtttcaacatcttttattttgtacatttacacacctctttatttatatttatcccttgtgaagtagataccttttaagccgatttgtttatataacttagcgattgtacttgcttgatgttggcaccactctatagcagtagcgtattggtgggtagctggattcttaggattccatctaattcggtacaatgtgttttgacctttattgatgtaatcctttcttacgaagctagcaccgcccatgattgcttttgctggagatgtccaacctttattccttgcaaacgtcattgcgtagttaggattgttgtcgtaagcgccaatgccgaagtagttgtatactccatcttttccgttagcgaagttacttgttccatatccactttctaagaaagcatgcgcgattaaataaatttcattaatgttgtgctttttacaagcttctgcgaacgctttaccttgattattcaatgttcccttacctttaagtatcttattaagtgcgctaactgaaacaccttgatacttgcctaaattaagcatttggtagcattgtgtgttactttcccatatacgctttacattcattgctgaactcgtttgtgctcgtgtagcgttagcccaaccccaagcattagattttttcgggttacctcttgccatttgtttatccagtgcttgtttgaatgtataaggactcgtttctgttatgatctgcggttgtttagatgccgaaccattgttggctgttggtgacgagtctcttacattagctatatcagcgtttttattatctaccataacttttattctagattttgttactgttggcttagttatagaatttaataatttttctctgtttttaaatatattaagtaatgccttttctaatgcttcgtatttatctttaggaggaacaccgttgtcaatcatattccaattaacatgttccaacattgaacgccaaatgctgtcgtctacttttaaattttcaatacttagaggtatctcatatttggccatcatatctacagctacaaccattgcgtgaatctcattaaaaataaattcatttttactcgcactataatcttcacatacgtctataactatataatcaggttcattaggaacttcaaatacagctcttctaggtgcccaaatattatgtctatcaacataaaagtggggatattctacatcctgtttgtatttcttcctactgttatataaactttctaccgagctcatcgtttgtgcgtttctaatcattattcctttaggtttttcgagtcgtcgattaccttctactataaagtgataaatatattctggataattaacctcttggctagaaatagtgtactttatagttgttacatctttccaaattggaacttttttattatttttttcgttatcatcactatcatcttctggtttaggtgccggtgtagttttgtctggatgatatggtggtctaacaaaatatttaacccctccacctggtccatcatgataagagtgtttaattttataaggtggacttcctgttgcgttatttgtataccagttttgatctacgccataccaatagtcttttgtgcatggtcccactacaatgtttacatgtcctgcccaaccaccagtccaaacaccccagtcgcctggttgtggtacaaaatcttttgtatttctaattatcttgaaatctctacctctataattggatttttgagccatagcatcagcatttccccatgttctaaacccccaatatttatcgagtaaataattaggtaaatcccagcattgtgctcccattccagaaccaggtacatcaatagctattttgtttttagcgatatataacgcccattcaaccacttcactagctgtgggctttctatttttcggattaggtaatcccatgtatgcacctcatttcaatcaaaataaaaagccagtgccgaagcactgactcttaactgttatttacatttaccaaaccagaagcacgcccagaagctatatcctaaaatccctttaagcatggtaatcacctcctttaaataccaaaaacagttcttagtaaagctatgacaatcgtactgaagatagtccctatcaaacctagaatccacatttttatgtctctaatattcttggcattcttttctttattcttttcatcttctaccttgtcgcgctttaattcttcaaaatttctatctaatttgtcataaatcttttcttgcgctctaagactatcttctattctgtcgaatttttcaaacatagtcttatcattttcttctaatcgcgttaaacgccaatcttgttcatgtcgtttggtaaatccaaacattatgccacccactttattcaaattaaaaagccacaagcattacacctgtgacttttcatcttttgtttctggatatttttctccagtgattaaagcgtattcttctttatcgattaaacccttgtctacgtaccacttaatttgctcgtttttatagtaaccccaaacataaaaagttttaatgtctttaaaagttggataaatcatcttcattatttaaacgtccccctcagtacttgttttgttagttttcagttcagtcaactgttgtgttaacatagcgttttgttgagctaattccattgttaatacgtttacttgtgccacctgcatttgcatactcgcaaccattccgcgaagttcctcatcacttaaatctgacgcactttgttggtttgatgcattcggtacgtcttctttttcgaaattgctattgtatttaatttcgccgttagtgaaaacaaactttctaggttcgaactcttctttaaatttaataggcacattgttatcatctacatctaaactattgcgtaaaccgccagtattaacgaatccgataacttcgtttttatcgtttactgtgattttcattatttccaccccataattttagttatagtaactttgttggcattcgctccagaacctgatgttttacctaaatcaaagtacacatcgttatctattcttaaagtagtgctacttgttttggatagtaagcactcataaataccgccaccgttgccgtctgagtcaactacattcgctttactcaattgaatcgcgttaggtaatgcggttagtccgaatccctcaataacgccacctggataagttccacttaccaacaaaatagaatagtttgtgtacggttcagttagattgattgttgtacctacaccatttgcgccaccgtcgaacaataccgttgatttatgttcattaggaactgtccactgttgctcaagtctgccgtttgtgattgatcgtgtgtaaatctttttagagttataaggtgtgaagttaaatagcttgtttgtatcatctttaacgaataccgataaataaccctcataactttcaacgctacctggtaaatccggcactcttgttgcatagtaattaccagcagttaaatatcccaaatcgccttgcgcattatttaagttaacttgaattgattgaccattcgcctctgtcatcttatgttgttgccagctcgttgttccgaatttatcatctacatactgcttagcttgatttaaagcgttgttagacgtttcttcaacaaattgcttagttaagtttccatcattctttttataaaacgggtaccatgtgccgtagattttgtattttgtgtactcatcgtttgaatcgtctgggtaccatgttgcacgagcagtattattatcaacaacataaacaactaacacaccagatttgcttgatgtataagttgattcatcgaacgaagaaccgtcatcaacaccatcttgtccaggcttctctaacgtgcctatatccgtcttttctggcgcatctgttgcattagtaatatgaataatcctagatgtgttaactgcgcttaaaacgctatctatggactgctcatacgattcaattgctttaccgtaatcatctgtaagtttagacttttgccaattcgttgttgaattacctttaacaaggtcagcgccattgatttgttgttcaacttcgttaacacgttcaaaaatcgcttgctctttttcaactattttatcgaattcagctgtaacagcttgtgttgcactagtttgcgtcgcagtaatagcttgtatagcttcgttttgcttgatttcgatttgttgaatgccttttgtcgcactatcattcacttttgctattaacgtttgtgtatcagccatattttgctttaattggttaaaatctttaccgacagcttcgatagtatcttgaatagatttgatataaacaagctttgttataccatcaaacccactaactaaatcattttcaatattgaagctaaattgacgttcaacaacaacattattactcccgttttgtgtaaagaatgcctgagcatgcaccttgcctgaatgttttaaaaattcattcggtatcacatactgcaaacgcccattaattgcgtctactatcgttaattcgtctgaaatataagcgcctctatctacgttataatcatcggtttttaacacgatagatgttttaacatgttcagaacttatagataagggtctgttattcttagttactgcaaaatttaaaacaccagttcctctatctgattcatagaaactgatgtttgtgtcaataaccggattatattgtgatgttgtttgtaactcgattaagttatcatctttcgaaaaattatctactaccattattcaaccacctttccttcgaataaactccatttaccaacgccaccagtaccaaagtttctaactaaaaattgatgtgcagacgggaagttattacgtcttaatacttgtgttgtattacctggtgtattcgattttacttctaatatccaacctgcaatacctttaaagtctttaggaaaatcagtaaatcggtttgattcttcagtagtgatatagaaatctaaaccaacgatttttaaatctgataattttgtaatactcttagggatatgttcccaataaccggcgttttgcgggcagaaattccatgctccgttgtttttcttattgaaaatgtcaatgacacgttcgaatttaagcatatttctacctgtgctgtttctggtaagtacttgtcttagagcaccattatagtgtccaggcagtacatccaagaaccaccctgcatctctaaacgctttcggtaacgggaaatctaatgcattttgtgtgtcttgcgtatagatatagtaatgaccaacttccgtaatatcacttagatatgctgggttctgtattggtaacggtttaacacgtccgcctgaatcagtcattgatacttgaggtgcgatgtttttcaagaattggtttacacctctttgaccgatagaataaattgaatgatgtctgttgttaccaggtccaatagttaccccgattagaagtgctttacgtcctgtttctagatcgtaatacatatctagaccctcagcctcttggaaatctcctttaaagttgttattcacaccgcctatatcgatgcgacgtttaaataacaattctttcgttttgatatcgaagccttgtaagtagttagggttggctgtattcgaatcacctgtataccaatataagatacctgcatcataagtgataccttgcataggttgtgtatctgaagtgtattccataggtatatccatttgatacaatactttgtctatacctttatcaatatcgtcagcacttctaacctcaacaaagttcaacgaattcttaagttgtctttcagtgggtttatattcacgtctaaaaatcattaaattttctaccggattataaatcgctgacgtatatctgtcgttaaatatattcggcatgacatcttgcatttcattaccataagttatttctccagttctatattggaaacgtacaaacttgttgtttttgttactgtccaatacagctgaataaatccataattctccatcaatgtatctatacgcattgtgtgtaccgtgaccgccgtttttaacaagcaatctatcaataaattgtccgttgggcttcaatctagataacatgtaatgattacctggacgagcttgcgtcatataaataattttcgttctagggtctacccaaaatgattgcattactgcatttgtatatggcgataaatcagtgataaattccggttcttgctcttttggttcgaatcggtattctgtcgctcgatattctttatagtgttcatctacagctttctcaacctttttagtgaaaacatctagtgttgaataatcatgatacaaacgatcttgcaatgtcttatgaccataacctgtattatcaacgcgcgcgtcttttacttcgttgataccgtcgccgttatgacctagtaccatgttgctaaatcgaccgtttaaatatgttaaaaagtcagagacgttacttgtaacatttaaatgttcatactttatttgttctccatcatgtgcgaatacctctttatttctgtggtattcaagagagaaattaaaatccgtcagcatgtctgaaataagtttaaagttatactcattttcatctacatatctgtagtcaaagactctacttaaatctgtaattagtttattactcatgttttcctcctttactatccataaaactgataataatttttaataagctcatacataataacttcatgacctctttcattaggatgtaatccatcaggcatgctagattttctaaatgctggattatatggtttgaaataatctgtgtgataagcatcatatactggtacatccaattcactacaagccaatatctgagcattgacataatcctctaaagttaaccctagtttgtttttgtccgtatctttacggcgtatcgttgtaccactcatagggcattgcctagtagctgtcattacaagtatttttgaagctggattatttttcctgataacttcaattgcagaacaaaaggcgccgtaaaacgttttagtgtcggttttatcagtgcctatcggtacgcctgcccaataaccatgtaaccagtcatcatctgtaccttgtaatatgattaggtctcctcttatttgctctgcttgtctataaatgctgttttctaccgcttctttacctattggaactgttgccattgttgcgccacctcttgcaaggttggtcgttttagcttttaacttcttgcctaacatttctgtgaaattagttttcgcatgtgatcctctagctacagaatcgccaatcgttccaatcgtttttacatctttaatgtttgatttatctataaaatcatgaacgatagtgccgtcagatgtagtcacagttttagagcttaccttctgttgtttatcttcaatcaaatcagttctactcatcaaatcgagtgttgatttagctattgacgctactttagacttcaagttttctgccgctttactaggattagaaaggttaacatcatttaatccagaaacatagttagctgcagtattaacttttttcatatatcgttgttctcgattaaactcaccaagcgttacatcttgcttaacaattacattgtttatacccctaatcgttttaacttgtactatacggactaaatcattcaaacctagtttggtagattttatttgtactatgtctccgggttgtgggtctgcttctggatatgattctcttaacaccaaaaagtccaaagacaaagattgttttaacgactttttcaatctcgattgtaattctttatccatagtttcttggtcagtcactttaccatctttaaatggttctgcgtggatgtcgccgtatatttcagctaatgcacttctagcttccattacgagcccagcgtgttcgaatgtttcttctcctgaataattaccatatcctctaatgaaggtggcgaaatcacttgcatcttcctcgagttttatagcgttggcgttgacttcgtcagaaataaaataagacgctttttgatttgcaaaaggcgtcaatacaaacttatatctgtctttctttttgtcatacgttattttatattctaaaccgaaatgttctaatccctttttaaacatttctaaccttgtatcgccttcaccaccattttcaaactttgaagatttaactttgccctcgacttcaaaaagcattccagtaccttgaaacacaatgttaaaatatctttctactgtaaaagatcctgttacattaacataaattctatcaatcattaacttgtctatgggaatctctctagcagtacattcaaccagttgtctgtcgccttctgatttcctatcaatgacagttattacatattctttcttgtcgttttcaccttcgacatgactaacaatccatcttttccctatagcgttaataacttcataagtatatttattttctagaatatcaaaagttaatacaccgtcagcattaactttttttactaaagttgtttctactggtacaggtgcgccattacctttaggtggtttaatagttattgtcattctgacacctacttataataaaatttcaaatcaaactgaactttttgtaccgtttgattaaactcaaatttattagctccgtatttaaattttggttgggctatattcgtttcggtacttatttcaacaccgtttttataaactcggaagctatcataaacaattctgtctccagcttttagtttgatcccttcgattttcattatttcagcatgcgttaaattccatacaaacgattctgtatcttcgcctaaaataattgttatctttttatacatgttgaattggtcgttaggagcactaccatgatagtaaactgtacctttgctcaaattttcaaatgtatactttcttttgtctccgcctgcatgccaatcaatattaaaatcaaacgaccacaatccaacctttttgttttcttctaactctaggcttgttccaatactttcaccgtatggtaattctgtagtttcgaattttagttcaaaagaaactttattacctttttgtttagggtttataactccgttaaaaataactttatactgtttaccatttacataaatttgttgatcgtgtcttgaatattcgtaatccgggaagttgtttttatctaatttcacgtaatcatcagaagttggttgagtaaacctgtaattcaactcttcttttcttctgatttctcgcaaatacataggttctatgtctgtcgttaacgaatacaacatatctcgcatataagcaatgtctgaacgatttttaactttacaaaaacaaggaacaactatatctctactgatataattgctccccattaatatacgaccgttcatattttctttgtcttgatactttgtgttgatttgcatgctatcaattactatatcgttaacgataaacccgtattcacttaatttgattacagtaccatctttttttgttaattctatgtccatttgtaacctcctttataagtaatactcagaattgcgtttagcatttctgccgttaacaatactagtaagcgcatcgttattgacatcgaattcaactttaacagttttcatgttcggtgatgtttcaatagaatgtgtgtgttgtacttgcgcatttatatttccacctaaattacttaagtttcctgtaatactagaaatgtcaggtgcgtttaatgtaggttgaaatgcatcaactactttatctgcaacattagaaacattacggataactttacttgaatgattatctatacctttaacgaaacctaacattgaatacataccaacatccatgaattcacgtgaaggtgagtgaatacctagcgctcttttggctgcatttaaagcaccttttgctacactagctgctttttcagctaagtctctagccatattaccaatacctctcatcaaaccacggatcatatcagcacctgctgatacaaagtcatccacaaagcttttaactttatttactgcatttgtcataccttgactaactttgtttacaacattaacgaatccttgaacaactctattaacaaagttaattagcgtacttgttatagtagatacccattgcatacctttagtgacaatgaagttccaagcttgagacattttgtctgatatagttgaaacaacttgtgtgaatatgcttacaactttattccaaattgtcgttaatataccagataagaaactccaaatcgtattccatatattagaaataaaactccatgccgcttgtaacgcagtagatatagctgtagtgatagcgttccaaaccttagttgccacagtaactatagtgttccacaacgtttgtaagaacgtccaaatagcgttccaaattgttattgcgatagtcataattgtggtaaacactgtagttattacagtgactaacaaattccaaatcgtagtagcgattgtaattatcgtattccagattgtacttaagaacgtccaaatagctgtccatatcgtcataactattgtcattatcgtcgtgaaaacagttgtaatgattgtaactaaaaggttccatactgttgttgcaatagcgataattccattccatagcccttgtaaataagcgactatttgattccaaacaatcattataaaattgtaaacattcgatactgctgtagtgatagctgttaaaatagcattccatacaaccgaagctacagcttttaatacattccaaacattaaccataaacgtttttatcgcattccaagcatttataataaagtttctgaatccttcatttttattccacaataaaacgaatatagctattaatgcagcaattacaccaattactattgttattggaccgcctaaaataccaaacacagttactagtcctgtgatagcatttctaattaatccaatcttaccgaataacaattggaatataactgatataatttttaatggtccttttaataacatgaacgcaccttttaaaattgttaatcccgctcttaataaaccgaacttacttactaatgcaatgattctacctattaatccgccacccataaagttagatacagcaagaataatcggtattaaaaatctaaatgcaccaactaaagttataatgacaccaactaattgtgctgtagctggatgcgcctcaaacaagttagctatccaaccagttattgcaactgcaacgcgtaatactgcactagctataggagccattgctgttgcgaatgcaactaatcctcttgcgatgtttccaatcaattgcattattagtggtccatttgtttgtatataactgacaaagtctttaaacccttgagattgtcctacttgttcagaccattccctaaacttagctgtcatttgttcaagagattggaatatgccagttgatgatccgctgaatgcattcatcaaattgttaattccaacgaaaacatttttgaaaatattaccaatgataggtaagtttgtttttgtgtattcaataaaacgagttatcgaattttctccagctgcactattagcccagttagagaaagattgacctaatctatccaaccaatcagccgaccattgaaacagtggtgctaattgcgtgaatacattgactaatccgtcaccaaaaccacctgcagcacttaatagcttgttaaataccgaaacacccgttgtattcatcatattaaagaatcttgaagctacactgctattttcagcccatttaagcacgctttgagacgcttcttccattcctcttgaaataccactaaaaaacggttgtaagctctgcattgcagttttaacagtatttaaaccatttgcaagagttgtgaagatagcggattgattttgctttataatatcagtccatgctgactttacgccatctaacgcttttttgtattcgtttgttgctgagctagcttgtaaagtgccatcattaagcatctttatagcgctgatagccattgcgccaaacgctacaaatcctgctcccgctattgctacggcaccacctaaagcaagtacaccaccagttaacactttgatagcgtttaatagcgcaaatactacaggtactacgctcgctattacaggtattaagatactaaaagatgatgtaagtaatccaccaaccatattagaacctacagtaccgaacacacggaacatattagctaaattccccatctgtctttgaaaattgtcatttgcttttattatgtaggcataagctttctttaaaccattagtatcgacatctacctttgttgtttttttgttcggcaatgcgtctaatgattttttaaacgcataaatagttggtatagaaagccctgtatctacatcaagtcgagatctagttttgttcggaatacttttaagttcttctttagtacgtttgattttagagttagcaacaccattgtccacgtctataatagctttggctttagacctatttaatgcttcgagactagctttagatacttttaacactcgattgaatttactgttatctgcattgacgtcaatattgacacgtttcttttctaattctgataatttagcttctgtttcagcgatatctttaatcaacttttgtttttgcaacttaacttctggtgtaacttctttagagtttagtttgtctagttcaaaattcgattctagtaccttttgttgtaaatcttgtatactagcatctaatttagcttttacatttttgttactaaaggcatctaaagactttttagcaactttgatagttttttgtaaatttttatcgttagcgtttaattcaacatctttagtttgatctgctactcgtttaaatctttgcacagacttaaccgcactatcaatttgccttttgaatttggctacactagcttcaatagtcgctttaattttatattccgtcacattaacacctctctttctattgcttattaaattctgctataactttaaagaattcattattttgtggttcgtattcatcacgttcgctactaaatcttatatctttaccttcgttaagccgttggatattttcttcataaggcaatacgtcgtttgcattgttaaaaacatattcctctttaggtttattttctgtcccaacatttttagtagctgcagcatcacgaatagcaaacgcaagtttgtaacgttcgaattcttgggttagcatttcatactctttcgcatacattcgatagttatattctgttaatgtcatttgctcaataacgttcaaatctgtaataccaagtgttgacatacaagttataacgattctgtcgtaagttattaggcttccgctggtttttcttccgtttccactacttcgactaggtttcgggtcataggtcgctttcccaactccgttaaaatatccgaaccgaattcttctagtccgatattttctgcgatttcatctaatgcttcatcaatgttattaatagtaattgcttgtttttttaagtgagatgtagctgcgattaaaacttcgccaatcacaaccggatttccactttctaaacctacaggcaacattgatacaccttgaccgatagaagcttgttcaacttttaaacctaatcggttatcgatttctcttaaaaatttaaaaccaaaacttaattctaatgactttccgttaatttctacattcataacttaaaatctccattcataattaatttaaacaaaataaaaagggcttaacgccctatttttatacctctcttggtgcaaccggtggtgaatctactttaggttgtggaattgctgttaaatcttcgccagttaatgcatctgcttttgtagtgtcgtggaatctgtatccagtcgccttaagtttctttgttacagcctcaggtagtgttgcaaatccacgttggaaacgaccattcactccatattcatattcatattcatcaataccgttagcttctgcttttaattcaaatttattgtggaaaccttggaaatatttcgctttaaatttagcggaatccccatttttgcctggtattctactttcaacttcccaagcttcatacaatacgcgatctacaactgcatcttcaatttcatctgcaaaatcgtcaccataaaacattttagcagtaccagacattgttgactcaacagaaccaccagtgttataagaaccgtccattgtatcctctgtatctgtatcagcttcatgtgataagccgtattcagttaaaaaaagcattttagtagcatctactttttcgccagcttttctaaataaaataatacgatcattactatttttcatatttgccattcaatattcctccgttttttaaaatgttttgtaagatatcgttactgatgtgtgtagcaattcttgattggtagtatcatcaactaactgtgtgatgttagtatcttcttcttcaaagtcataatcgtttgttttaacgctaggtgttaaatcatcaatacatcttttaacaagtccgtcatgatgtcctaaatcatcgcttacactccaaatatcaataactaaattcgtatcgccagaataactatcaaacgtgtacttacttctatttgactccggcatttttattacaaaaaaaggatacggaatctcttgttgcatctctttacgagaaataacagggaatccatatccttgtagcgtttcatacgctttattataaagttgtaagttcggtgtcatgcttttatctcctattcaaacaacgctttcaattcttctacagttgatttcctaatcacttcgtataccggccacataaaaggttcagcctccatgtatcgagtaccaaattctaagaaaccactataagctgcgtgcgatgtgatagtgtattgcaaatcgccagtttttttatatctgatattgcgtgataaattaccagtccaataacccttattcattacttctctagctttcaatttagctcgtactacatattctttggcgttttcctgtaaaatatcatctacatcatcatcaatgttggttttcatatcgtgaaattggtttaacagtgcgtctaatccatctatattcatcaattgacctcttcgatataatatgacgtttcgtgtctgtatatccttgtatcaactatcttgtagcgaatgccattaaccaacacgtggctaacagggtaagatattgattcttttatcctcagaacacttacatcgttttttacatcaccaaattcaagttgctttcttgctctagaaatggggttaatattgcatggtatcgcatcataagtgattagtgtgttttcttttttgctagttttaggattgtaagttgctacttgttctaattgaaaaataactctatcttcatatctcaaaagaacacagcccttccttttttagttctcgttctagcattaaagtaattatcaataatagcttcatactccttgaaatcgttcaattcatacgcattgctacgtccgtcaaccgcttctgatgtcataccttcagcaccaatcctgttgtagcgtttaactgcaacttctttaatcatgtaactaaacctttccggtatttgttcaacttcaataggtaacattgataacaactggctttcacaactttttatgatttcttctaattgttcatcttgcttttcatctttaagaccaatacgtttttttacatcagctagcgtagtcatataaccacctactctagtgactcaaaagcattgataatttcagcttttgtttgtttttcatcaacttgtaagccagcaacacttgctatttcgacaagttcttttttggttaatttgtcatttacaatgtaaatcatttgtttgttgcgtttattttcaacactagctaaagctttgatacgttcatctgtaggattataacctttacgagggtagacatgccctttcatatagacatgtctgttatcttctaaatctgtaaaatctactttaacaattccaatgatttcgggcatgttaccactcctaattatttattaaacttctcctggaactgaatctgttcttttgtcagcaggaactaacttagcaaacgctttatcatcagcaatatgcaatgctacatgcatagttgcacgtaatgccaccatgtcttgttcaaacaagtttacaggtgtgccatcttcgtttttaactgtagataattgtgcagtttcatcgattttgtattcgattaattgagggataccataaatcaatttgtcgaagtcaccagtgattaattcaccacgttttaagttgcttgatttaaggttaaccacaggtagaccgtctaacgaatcactgttacggtcataaatacgttctttcgtttcaggatctacaattttacgtaacaagcttctgttttgtgtttttgagataaatgcatttgcttctaattcgtcatcttcaagcaatgcctctaaatcaataatgttatcttgtgtgaagtcacctttaataaccttattagttttttcaattgattgtgcaattgatttaccgaacggattgttaccttgattcaaaatacctgcctcgtcaaactttttatagaaagcttcagcaatcataggtttcatttcttcaaagaattgtgaataagtgtaattcaagaattcttttgttactggtaagataacccctaatttaaacgctctcattgtagcattaacccaagtagccttagacgtttcgattttttgaccttcacctacccagtaagcacctggtttatcagcccaaaaagtaaacttcttctcagtaccttccattggttcgtacttacctaattgcatgattttagagttttccataacctcttgtaagataggtgttgtaaagtcgtttaacaacgtgccatctttcttttcatgcatcattacattgtcagggttaaatacttgtggtttaacattgttacttgcaaaatgttgcaaatttaattttaatttttgtgtttgttccatttaaatgcctccgttaatttttaataattcttttttgtctagctatttcagctaagttttgcggtttatttttagtcgagtgattaaatgaatctccaccagtcaatggcgattgtctagcgttaaccttaaccgcttcattaaccgctttttttactgcattagaaaaagcttcaacattcaatttagtttgttcagcagtatctgttacaactaaattgacaacctcatctgatgaatcaacttccgcttcactcaacatttttcgtgcttctgaacgcatttcgtttaattgtttttctgaacgtaattgttccagttctttttccatttgttcgcgttcatattcatctttttgatccttgttcattttcgctaatttagcagcttctttagcagcttctgctgctttttcttttgcatactcatcagcttttttcttttcgtgggctacacgacgttcaagtatttcatcaactttcttttgttgctctggcgtgaaagttatttcagtaccttcgtcattttctttcttatcaggatttccttttttaccatctccgcctggttcgtccggatcatctgattggtctgcaaaaaattgcaaattaaacttaagtttattttcttccatgagatatacctccatttatagtctgtcgactgtttttccatgcgtgctttttatgtcatcagcacgttttggacataaaaaatagccaacacaattaagtgctagctattaaaagagaggttcattatatttcgatttttctttatcggctaatactgccgaccttaaactgtctaagtttgcatcaataataactgtttcgtttcgcttttgtaactctttacgtataccttttaattctcttgctatgtctctaaggtatttgtcagtattactcatattagtatcctccaaacatttaatttactgtcatacaaaactaacttgcctttaaaaaacttcacttttaaatcaatcaccgcttttcactttccctccgaagtattttgtttttcgtttcttgcttggttttttcggccacatagatttaggtagtaaagcgcaatctgaacgacaattgatatgcataggatagaaattaacaccaattttagcgtctttaactttgaatatttctccattaagccctttgcatactttagttgttctattatcgatttttgcaatatacatataatatccttccggtgaaatttctttcatgctgtcaatgcttgattgtgcgtgaacacgtgccgattccgtataaagcaatgatttaattgctgcggtcttttgtcgtgctgtgccttcgaatttatttaagtgcttgcgcatatctttaacatattcattaggatgtcgacctctaataactacattagcaattatttcttctacttcttgtttcattgcttcggtattagtccataatcgctctgaccaaacgacaccatgaaattgtgtatcaacgattgtatctataacttctttagctacttgtacaccttcacctaaaatacccgcttgatcactgaacacacgataagctgttgattcgaaatattccctcatcgataattctgtttgagctgttgcataagcaattaagaattctatttgaatctttaacatctgttctctagatacatacattttcgtgttatacttctttaattcttcatttgctctatcgctaaactccttgttttcgaccaatctttttgcttcttcttgaaacgcttttacatcgaactcatcaataatcttttgtgcttcttgtaatgtaacgcctgcaaaatctccgtacttgacaataaacgcattgatctctttttcaatgcgcttaatcatcatattcaatatacgttctatttcttcagctttagttttatcacgcttcaactcattctcgattgctttgcgtccgcgttcttcccaatattcttgagtgtttttgttaggcaattacaatcattcctttttatcaacagtatcttttgtatcatcatcttgttcgtcatcattgatgtctctagggtctttataaatacctttttgagcttttttaatagattctttctcatcttcttcgattttcttaacttctaattcagggtcttggaagaacgagaatagagacattaaagttgtttggctaatcttcccaccagaatcaatataagcttttaattcttcaatcaatgatttaggtaagtttctgttgtatacgtatctaacagtattgaaatctttgttagcgtcaatcgaccatgtatttttaagtattgtctctaacaacttagcacgacgtcttaaccctttagtaaacaatccttctttagttttagtacgttgttccaatccaaataatttgtatttcattgcctcgcccgattgagtgccgctaaagttatcatctttcatgttaggcgtgttggtaaacatgtgtatatcactgtttaaacggtctttataagcttcggtaccttgtacatcgtattgcttataaatataaccaccatcaacagagccttctgtttctctaccttcgctatcagcataaacagtcggttctaaaaacaacacgttagcttccttttgttttctaacttctacaggatctaaatttaaattacctttaataagtaacatagcgtcatttaaatcactcatatagttagcagtatctgattcagcattatcatacaaatcaattaaagtgattactttctcataatccccttttcttctttcgttgttgctaaattctgtaataggcatacgttcgaaagagtgtgattcaaaaccgttttcacgtggtgtgagcttcaatccatttgttctactggtaagatatctataaacaccgtgtgaagtgaataaatcaactgtaaacacttcatcttcgtcagtcttgtctattggtttagttcttaaatatctaacgcctgcgatactattacgttcaattgtattgtcgtatatgacaaaagtactcattgcatcactcttgtataaacgcgtttcatcatcttggtttctaatcattaactcataagctttgccataaattgacaaatctaatcctaaagatctattgtgtgactcaacatcatttaaatcattgaacgcctcaataacttctaatacatctttgtcatcatcttgatattgaattggattacccaagaaatagccgttgataaaatcgctaatataagatgcgtaatcatgcgctacacggttatctgccatgtactcttctttgcgtcgtgttaactcaactaagttcttagttttaccttcgtaataatcacttaacactttcaatctaggtcgttggtaatccatgtgatgttcaatgtatttacttacttcattaacgttttgtaataaatcggattccgtcccgtcatatgtgtaaacaacattggcttcatcattaaataagtaatttatgtttccccgtagatctgtatctgtttcaaattcgtttacttttaacatttgttccctcctataatcctagagattttattgtgtcaactttcgaactgagatttgtgcgttttctaaccggtctgtagaatcgttccactgaataacgcaacgaatcgatacaatgattgtatgtatctactggttcattggtatattcacctgtatctttgtccttttgccatgtgtagttgtcaaactcttcaatagtcttgaaacaacgttcatcaacaatgatttcaaattgcattaagaattgtaacccttgtacaaccgagcccttcccttttttggttggtaaaatccttttaagccctagattccttaattcagctatacttttttgttctgcactatctgctgtaatttcttctttagcataaccaagttgctttatgacattagctatttcatcattcagcataccttgtttaacatactcttcaatgatgtataacttctttttctttacatctattttagaatgtataaaagcactaggatcattaacgtagccaaagtccaatccaaaataagaaggtaaatgtcttaactcatctttatttattaaacgtttttcatacttagggaaaaccaatttgtctagtgtagcaaattcacctaacgcataaattttgtaatatgctggattacgatttgctaacaactctaagttttgtcgtgtcatttcatcaagaaacttattatctcgataactagattgtctaatcatgacattttccattggttcaccatgttcaaagaaatacttataaacccaattcagtttagatactgggttaaacatcaaaaatatttgcttattcacgtgtttacgctccctcaaacgcaacgttaattgcgtgtaatcatttagtgtgaattcagacgcttcttccatgactatgtctgatatgccttttatcgactttattttctctgggttatctaatcctttaaacaaaaaaactgcgccgtttggcaattcaactttgttatcagtcttattccaaaggcacatgtcccaaataccaaagtttatcaaacaatctttaacatcttcgaacaaactatctttaattgttgattgtacttttctaagccacagtatacgcctaggatatttccaatcttgcaatgctttgagtacaactttttgtataacgccgtgagacttaccgctcgaacctccaccgtaatgtacttcagtgaagttatcgtaattggttagtatttcgaatatgtttctattgaaaacattagacggtttgttaaagtttaatttaactttcgtcatcgtactcaccaatattaatctcaatattcttctgagtaatttcttttttatcgatatacgcaccatgtacttttagtatgtggtcaatagatctctgacgctcttcaaaagttggtgtgattgtgtaagtaacctctttttccacttcatcgtttaaatggtcatatttcttactgtaagcctcttgaggttctcctctagcaatagaagcagataacgctaaagcttctgtaatactcattaaacgctcttcttgtatctgttctaatcgttctttaatatattccgaaacattaacatttcttaacaatcgacttgctaaagactctgctgttttcttactataacctgctgtaattgctgcttttttaccattacatccattcattatatattcatctgcgaatctcttttgtttttcgttcatttcatttaccaccaactctcgcgctatacgctttttaaaattaaaaaaggattggctataatcagccaacccacatagatcctttattcctaattgcgataagggaaacgcagtacgatagtcaatatcctacactatcataatatctcatttaaggtatcaaaaactgccactttactgccaatttcagtcttcccctaactcttccgccaatctagatatgatttttcttttgattctatgagcagttctatcagaaatgtgtatgtcaacacaaactttcactaattcctttttattaaaataatactcttgaatgaattcgcgttctttcctgcttgatgtgttgattatacgttcaatagcgctcttaaactcaaggattttacctcttcgtatactacaaagataattagttactgccatttctgttttcgatgtattagacggtacaaactccccgcctatatttgtatctgttggaatccacggtgtcattatttcacttcttaaatcttcaagttgtttatgataattaggataatcacacaactcatcttctaactttcgaactgttgataattttaatccgtatttctttttagtcatgaataccctccgtacaaatatgtttaatcttcaaagtgtctcaatctacttcttaatatctctatctctcgctctttaacttttacatcaccttttaactgttccgcttgtaacatcacaccaaacaataagatgactagtaatataattgctatgattaaccacatcatctactccgacacctccgccctcatcaaatcagactgatcactcaactttgcgaagtcacttggcgcctctacatcatcattagccgtcatcataatatatacttgctcagttacatacttacctaactcatacatcgctagtaagaataatagtctcaaaatttctttaaccaccactaaacaccccatgttaatttatcgataatttgtatagcttgttttaatgcgtctcttttttctttgatatctctattatcgccatcttcatcagctgacattaactcactgtcatattcatataatagttctgatatttcattactagctactactaataagttttcatctacatcaatcgttaccgttttctttggcatctccatctctccttatcttaacttgtgcctcgtatttgcgctcagcttcttctttactctctgcctcaacaactgtaaacgtctgattatctctagcagtagtaaaatgttcatgtggttgtcctgttgaatctttgaatgttgtgactaagtattgcgtcacttcttatcactcctttgaatgattctaagtttttctacgaataaaagtattagtacaacactcaatgtagccaacatatttttttgctttgcaaaatctactataacgattaagactaataacattccaattctgcatgtaaataaatctaattctttgtacaaaaccatatatctgttaagtaaattgttaaatattactatgaatacaagtattggaactaatgtaatgatgtaactcacttccccaaaacctccttgactcgatctaagatgtctttacactccgctacttccgaagcctttttctccacgttctgaaacactttcgaattcctccacttgctttagttcaggtgtccatataggcacgataaccaattgagctagtttgtctccttcgttgatttgataagttccgtattgtcttatggcgtcactcaaatcgatttctcctttaatatcaaaaacacctggtgtgatataaccattcgatgcaatagcgtcattcttgatattaatccctaaattgccgtgatatcccgcgtctatcttgcctgtttcaatcactaaatgcgttttactacttacaccactacggctagttaatagtccgacatagccctctggtatgcttacagctacatctgttttaatcactgccttttcttgtggctcaagtacgacagtttcagctgagaatatgtcataacctgcatccgtcttatgatttcgttcgggcattctagcattttctgataatagccttacttgtaatgtgttagtcattttcctgctcctccctagctgtagcaaacgctattctcaatttcaatctttcaacaatatgaattagtgcggtattgaggaatatttcaaattcttcaatgttctcatctataaaatcaagtatttcttcctcttgttcactgtcaaactcgcttagtacatcccaaatatttatgtcgcttttgctcgtttctaatactcttttgattatttctgaattacttttattactcattttccttgttcctcctcatatttatagacaacttgacctgccataatccctactgcttcatcaagttcaataccttctttaactgaatgttgaatagcatttgtcattccctcaagtatttcatcaaacgcttgtgctctcttatacacgtcctcaatctcttttagtaatccctctgtgtcattaccgttatacgcactagcactgatcactgattgttcaatttgttcgcggttattcatcatttccatctcctctaaaataaagttagttgcttctgctcctcgtattccaaaccatgttgctttatatatgtttcgagctcttccgctgtatcaaatgtctttttcacgccttgccaacctggcacgatatgcccatgaaagtaataagtgccgttcactacatggatatgtgccactcgttcgttatcctgatacagatatctcttagatccgaaaaattggtttaagtattctttacatgcgctatcggttttaggcatttatgcttcctgccatttcttaaacatttggttataagtagtatcaaaccagtacggatcacgtgaatgtttttgaggcacattaaacaaatgtggcttcttcttacgtagttcagcctctttacgtcgttgcctagccatttcacgctctttgctctctcgctccatgattttggataacacaatttctttatactcagctaagcgcataccataaggtgcatgtaaggcttctaacaacgcccagccacctcgtactctttttgcaaccattcctggagttaaaccgttcttttttatcaattcattttcatgttcggtaaatttatatggtttaccgttaatctttacgatactcatttattccacctctatacatttactttttttaatccaatcctctaatttgtgcgtgttgtgatttctagtaaatagttcacttacattaacacctagagcatctgccaatttatctaatacatttaagttaaccatctcagcttttccgtttttatatccactaatagttgatcttgatacgccagtttcattgtgcaaatcttggacacttacgttatctctagccatgattacccttaaattagttgcgaatacttcgttcaacttcatttattccacctctatatatgcatgtcttattgttatgttgtcatactttagtaattcgtccggattgtcatctaagcgctttgccagcgtatctttttctttatccacatcatcgtaatgctgatattcaacttctgtaggtattcttatatcaatcgttgcgtttatatatgcttgttgttgcattagatcacttcatttctctttttcttttacgtctgactttcactaagtcctcatataccatccattcttgacctgtgtatttaggcgctttacatatccacgttaaattcacatctctatactgatatctgaatatcttcgctttgatgttggcaacttcagtcgccttacctttaacgtctataacttcaaccagtttcccttccttccacaaagagaaatcggctatatacgtaatcggtctttgtttcccgaatttaggttgtaattcaaatttcggttgtatttcgatacgatcatagttagtgccattcatattactttctaaatattggtaatattcgcactctactttgctatcaaatacaattcctttgtactcaactttcttagcattgtatttactcattgtgccacctctaaatatcaaatatcgttgcttgcaatcctagctcttgctcatatagaagcccgtgagcgcctttgaatcgttttaggtcactatcagtcataattttcttttcgtcgctgaaatgggctcctgtgagcgaataaacttcatttacgttgtctttatacttgatgaccttaatatcttccgtgccatcttctcggtataagtaatatttttctttcggcattttttaacactccttaatgtgtgttttcttccagttgatttcattcatgattttcttttcaactctgtcgtaatcatcgaaaggcgataactcgttattgtccaacaatctattgaccgcccaaccagtctcgatatatacatttgctacaatcgggtcgctttgctttgtctcttcatacatcgatttcaataagcttttgaattgcattatattcatgtgaaaaacctctgagtcttcttgtaatactcaaattcaattattccggtttcgccgtctttgtttttggctatgttacattcaacaatagatttgccagtgatactgtcatcttcgtcacggttataataatcatcacggtaaagtagcatcgctaaactcgcatctgcttctattccgcctgattctttcatgtccgatagcattggtcttttatcctgtctagactcgacaccacgattcagttgtgaaagtagtacgatgattgcgcctgtctcgttagcgattatctttaagtcacgtgatatcttttctactgctacacgtctatcaactttcgcatcagtatccatcagttgaagataatctataaaaataacttgttgcctgtctgaatgcctcattgcttgcgctcgcacatcttgcggtgtgatattacttttatcagaaatatcgatgcctaatttcatgattttatccatcgcattcgttaactttgttaagtcatccggcgttaagttcctgatttcttttatctttgttaactcaataccagtaattgttgataacatacgtttcaataccgatgtgccggttgtttcgagactaaagaaagatgttttgtatccattttgtgctatgttcagcatcatgtttaatgcaaaacctgtcttacccactgagggacgcgctgcgatgacgattaattgtgatggttctaatccccctattttgtaatccattagcttgtaacccgtcttaatttgcttcttagggctatcgctgtataactcttcgacaaactcctcaacaaacttcttggttccatcttcttttttgttagtaattgtttttaaatccttgagttcatcaatcaagttgttaaagttttggttcgtaggttgttgtttgaactcagttaccaattcgttagctttgttgagctgataactttccaataattcttgttgataacgttcaaagaagccatatccaatgaaatcggagttgtaaagtttagttatagtatctgcatctaaaaattctttatctttagttgcttttaaatagatttcttgatgatctatctttccgacgtccattacataattgaaaaaggttttaaacttttcgttcgtaaacatgtaatctttaactcttatcttttctaatacgtccggttgtttaagtagcgtagcgattattgtactttcaatttcgaattgtccgtaattcattcgttttcgcccccaaattctgccaacttattcatgaacttatctagcgctatttttctttgtctgacatattcggggtcattctgcattttccattggtgtgtagcggtttcgttatctactggctcgatagatacttttttaggttccttacgcatgattgctggtaagttaggcgggtacgggttgttactgttgatataaacatctaccgcttttacagttggttgataatctccattttgacttaatacatcaatccacatttctaacttcggtttatcaaaatcaatgttgtatacgtacctaacttttttaataatttctaatgcttgtgttttgctcatcggcattagtcatcactcaattctttttccatttgtgcaatgacatcatcagtagtattttttctaggtgctattttattttctgcatcttcttttgttttgacattctctttagcccagttgtttaaaactttaattaaatagccaccatgcgcacttttgcttttagtgtactcaacacctacttttacaacttcaaaagcgtttgtacctatatcatcaatagcaaaccctaattgttccatttgattaggtgttaacttatcatccaaatttgcaattatatattttattgaagatgagaagacggcttctctttcttcttctttattcttatattcttcttctttttcttcttctctttcttcttcttcttctgtatcgttacgtaacgttacggtaacgttacgttttgcttctagtaactttttctgtttctcacgatagcgttgttgtcgcaatttatttttttctttatgcttagctttgctatctaagctttgatgcttctcccagtttgtcacttttatgacaccattaactttttcaatcatgcccaatgtctcaaaagtttgaattgctaaccttattgagttaataggtctattaaattcatttgctaacatttcttcgttgtacggcaagttttcggatagcataatataaccttgttcattgtactttcctgataaagttagtaacttaacccaaatagttatgatcgtatctctttcgggtaaagcttcgatatatttgattttgctgtcatcaaacatgccaactttaagttttatccacgatacttctcccattgttttctcctttcagcattttgttgagcctctcatcaacttttatccacgagtcatgcaagtgatatttatcatcaaacgacttaacgccaattgcgtgctgttcattatgatgttgtctacacagtgctaacacatgtttgtcgtagtgattcattttgtttctgttcatgcctctgccgactgcttcataatgtgccaggtctgcgtgaggctttccgcatattacacagttgcggttgattgtagcccaatataataacgctttatcttcgcttaacaacttactcgtttctacactcataggtatttgatgatgaaacataaacgctataatcagttctattaactcccttgcaactttcatagaacagtcgcgcagactgatttcttcataacctttcataatttccaattctgtttgtaataattttctagttgattctactggttcgccccagtgaagttctatatctctacacattgcgaatatttttttgcgttgttctatagatagttttttattgtccggaacctctacttctgcttttagtggatatccgttttctagtaagtcaatgtgactttgttcaagttcaacaccagtagcaacgacggaataagtaccgtcattgtctttctggtatcttgtaatgtattgcatttaaaccacgtcctagaacggtaaatcatcatcattgatttctattggaccattagcattagcgaatgggtttgattgttgactcattggcgtctgtttcccatttgcttgctgttctttttgtttcatctcatcagttttaggttctggtttattaactacttcatcgtctttattccaaacttttacatatgagagtcttacaaaatacttgccttgttcctcgttaaatttatttttaagtacaatagttccgattttgttaattaattgatctgtgtcaaaagttaaatctggtaagttcaatttaattcctaatctactaagtaactcgatatattgtttttcttgataatcttgttggaatggtgggacgaattggttgtgtttgtattgtttaccttcgttgttttcaaaaacaatcgtgaagtatctgttttctctgtcgttaaactcgacatttgcaacttttactgtaaattctccagctcctaaaaagtccccacctttcatgaatgcctcttgattagtttcttgaatgtattgtgttctaccagtgattttcataatttttataccgtccttttaattaatttttaattaccatttctaattgcttgtacaacatcgttaatacttggattaatgaaacgtttgttgttaattttgatgttgcttgagtgtcttatctttgtctcgaataaatttgatggttcagcgttaagtacatattgataagttttttcgccgtcttgctcatgttcttctattgtcattcttgctaacacgtcagattgactgatgactgctttttttatttggtcttgtgcctctatcgtgattgttggattgatagtacttccctcatcatctttgtctttgttaatgccctcgtgtccgcttatagcaagatgaaattgataatgttcttgtaatttagaaatataacgataaatacttacaatgcgtgtagcacactcgccccaatcattaaatgtcggtttctttgatttaccgtccatgatgtcgtccatagtgatatcacgtaacttttggattgtttcaatcactacaacatcaatttgttttccgttttctcttagttgttcaataattttaggcagcattttaatcactgcactaaaatgcttataattcttaatctgcacaactgccccatcttctgttaccgttgttccgtcctcatttatatctagtactaaggcattgttatcttttgttaaaaacgtagttttaccagtaccgaacttgccgtatatcgcaaatttataaaacttgtttgcattttgtttgctgatgtcttttacacctagttgcgttaaaatatcgacatcttgattagttttttcagtcatctattctcccacctttaccgtgtatgacgttggtttctccacaatgctagcaccctctaaaacttcgccgtttgcgtcaatcaatgtgccgttttcagttacattgaaatctttcttaatgtctgattggctaagttttttagttacttttacatagttgtcaaaacctcgttgctcaagttgtttaatgacttcttgctcattgctaacttgaatgacttttgaaccttttctggctgtcacttttccgtaaggtgtattcaacttgaatttgctatcttgttctttttgtattctgtaatattcaattacaaggctttgtaaatattctttgccactctgtaatttttctacttctttatctttccattcgtttatgcgttcaatttctttatttgctaaatcgttgatttcattctctttagttgtgattgcatccagtttcttaaaaacccagttagcactgtctagatcagttactttgaatcggtcgtcttgttcgaatgtttctaattctctctcttgtaaatcattcacttttcatacctcctaccatttcatgactaagttaattagtttgtcctgttcatctgtgttattttcaatccattcgtttataacgtcacgcattgcatccgtcgcaatatatagttcgcttaaatctatgacatgaaacgatttaagtggaacattattcatatccttgatttgtatactgataccgtcatgtctcttcatcacagacactttaaattcaaacccgttaaagcttataattttgttttttatctcaccaattttgtaatacatcgttctcgtcctccttgtcttcttcgtcctcctcgttatcttcttcgttttgtaattcataaattttgttttttagttttatattttctttttccaatttttcgttttttctttcttccgcaaaatacttacctctgtaagtatcttcttctttatctttaacagcctttatttcaataagttttctgtactcgttcaatgtgattgttactgtcaattcttgatttgctacaaagttatcttcttcatttctgtatcctgaaaaatctttagtgtaataatgttgttcagttttaatattttcagtcatagttgactacctccgtatattttgatttaattaagttgtatattttgatgaacacttattgttacttgttggcgcaagtagcagttttttcattcttcataaaagtattccttatagaatatgaatgttgcgatacttgcgaatcctgcaattgaccatgctgtagtgaagtatagaaacggcataagtacaatcgctaagactgtgaagcatagtactgctactaggtagcttttataaatgttactcattttcttttttcaactcctccattattctctggtctgataagtcgtgataagggaattttttcctagctaattggactggtattctgcctcgtatcgcaatgtatccttcatcttcaagctctttattcagttctcttattatttgtcctgctttggatttagaaacagataaaattaccgcaagttctttagcttgcaaactatttttcatcatatcttttcctcctttaaaataactgttgattctctgggttatctgcttcgtaattatctgcaataatacttttagcgaaaaagtccaaactgaccttatataggttgttcatagatttctttacgttaaccccttcctcaagtacataaggcaccctaaaatcatttataaacagtccgttttcgtctaaagtaacggttggtaattcaggtttgttccgtctataaacttctcctagtgtaggtttttgcttttcagcttgtttagtgaagtcggaaaatgccttaagtagttttattcctgaatcaggatcactgtgtcgctcaatcgtttctgctgtagactctttactaaaatcatttctattgattacaggctttctcgtatttcgttcaatcttccaaaccttccacgtcacaactgccattgtggtgaggagggttgttttgtatagtgcgttcatttgtaattcctcctattaagttgtttgttcaattgtgtgtgttattcttcttcgtctaaatcaaagtgctgttcgatttggtcaattgcccactcaatcattgattcaaggtgtttctctctgtcgacttcgtaagtgtgctcaatctcgcctgcatatgtcacagtaagagtatctttgtgtgtgtatgtttgacttttgttttctttaactgcataaagtgttaatactatattgtttagcttttctttttgttctggtgtcatttacgctccccctaaattagcttcataaccgaattcagtcatgatttcatgtattttcaatctgcctttttgtgtccatctagtttgtaaaactgtgtcttctctgccatcagaacgcacaattgttatagtgtctgaatctgtgtaactcttgcccatgtgttctgagtaaagcacccactgtttatttacttttcgttgtagtctagcttcgtgtagtagtttgtttaacttttgtgctgatataccgtagtctgccgcgatttgagttgtggctaatgtgccagttgattttaagatttcatcaacataatctgctttgggttttagctctccaatttcttgttgtaaaagtaagttttgctctttttctttcttatactcagtcaacactgtaatgatgtagtctggatcttttaatgtttgttcaattacattgtctgttgcgtatataccgtgtttgcgaatagctggtaggacatctgatgttacccagcgtttgaattttctagcggtttctctaattttttcgtttttgctttgtttagaagcatcgaagattagactgtataatcctgattcgttgataatgatcatatttctgttttgacctgatgcactaaattggtgcgtcagtttgtcctcgctatcaacatgatttctaatggcattgtctgatcttgcatatcctaaaatctcagcaatatcttttcctacaaaataaggttcgttttcaatttctactgttcttactggtagctctttaaaattaaatgtttgtaatgcttgcatttgagtatcctcctttttcctcaacacccacattcagcagacggttatcgcaatgactatcgaatgtatttaaacgcggctcatatcatcgccagctctcgctcacatctgctcaatgtggatgttgataagcgtggttatattaagaagtgaatgttactgattcactttccgccactctgttaaatcagtaactttgttatcgctttcaacaccgttaagcttgtctaacgctttcactactttttggaactctttgatagcacttcgtagctttttagtaatttcatcttctaccatttccaaaccagcaaatgcgtcttcgttattcatgcttagatgtttgttgaaaagatctcgagtgtatcttatttctttaagtgatttatcataagcttcaatttgtcctgaaaggttatgatattttagttgtagttttactaattttaatgattggtcttgcatttgttatgtctcctttaagatgtttgtttgcgtttcgtgtactttgtgggtaaaaaaatatctccaatattttcgtcaaaaaaatcagcgataataaacatctcatcattcttaaattgatgctttcctaattcttttaaacgataaccttcagttgatatattcaagaggtttgctaaatcttcttgagtacactttctttcttttctcaactttattaaattccattgcatgttgtcacctcccgcttacaaaacctactatacacgatacgtgtacttgagtcaacataaaagtttgcttttcgtgtatttttttgttgaataccaaaaataattgggttatactataggtaaatttaaggaggtaagaaaatggataaaaaagaattagcgaaatttataggcaataaaatcagatactatagaaccaaattgaacttaactcaagatcaacttggagaaaaactcaacactaaaaaagctactatttcaaattatgagacagggtacagaactcctaaacaagatgatttgtttgaaattgctcatattttaaatatcagtatcgatgatttgtttcctacaagaaataataaaaaaaacgacatcacttccatatacaacaaactcacacctccccgccaagaaaacgtacttaactacgcaaatgagcaattagatgaacagaataaagtcacttctatagatgaatataaagagtctaaactagtatcgtatattgcatgtggtgcaactggtgctggcataggagaagaattatatgatgacatattgcatgaagaagtattttttaaagaagacgaaacgccatcaaatgctgatttttgtattttagttaatggtgattcaatggaacctatgttaaaacaaggaacatacgcttttattaagaaagaagattctattaaagatggtacaattgcactcgttgtattagatggagtaagtcttatcaagcgtgtagatatatgcgaagactatattaatttggtatctctaaatccgaagtatgatgatatcaaagtcgcttcgtttagtaatattaaagtaatgggcaaagttgtattgtgattaatagcgcctatatggcactttaatataaaagacgtctatttcagcagtgtttaaaaggagtttataatgaaaataactaattgcaaaataaaaaaagaaactatagtatatgaagttttaactagtggtaatcaaccattcacttatgagttacctaaagatttatcgtcacataatgcgcgtaaatacttggaatttatttcacaaaaaatagatggcgataagttaaattaattcaaagaataaagtaacttcataaagagtacgaagaaaacgatctaatgaccgaacttattcttgaatatttagtaaaaaagtatgttgaagaagaatataggaaataagctcctatacggcgctttaacataaaaagtaaaggagaaataaaaaattatggaatcatatgaagaaattgagcatatacacattaacactggtagaaaaaaacttacacaagaacaaatagaagaagccaaagcttttatagacagtcaaggatttaaagatatgattcgagaagctaaagagtcacgtcaaagagttatggagtctaaaattaccgatagaactaaaatgtgattaatagcgcctatgtggcgtgaggaggatgagggatggaagagaaacaatacttatggagatataacgatatagaaaaaagaatgaatgaacttcacaaaaaatataaagaattagtggatatattttttggtgatgtaatagataaaaatactggatacttccccttttattccggtataaaatatagctacgcagatttgaatatcagtttttacagaggtttaatttatattcacggtgggtcagaaggcatgcaagcgaagaaaataaatatttctgtagatgatgttttaaaaagaacagaaagatctttcgagaagttaagtgaatatataaaaagtactttcattttcgaaaaagtcatacatgattttcaaatgtttaacttgagcgatttagctagtatatacaacgacgatgcaattgcgcattattattttgaaactcattctgacttatatttatcagataaatctacaaaaatttatcgaacacctaattctttgttagaaaacgcaaatgatttaccggcttctttaagaaaatacactcaattattagaaacagttaatgacaaggattttgaaactcatatagttgaagcttatgattgctttatgtctgaaaaaaggctagctacatcactacttttaggtagagcgctagaactaatgtgtaggctgatattgaacaagtttgataaagatataattaaacaaacacctgattacaagaggaatataagaacatttttaaacgaaatggaaaacaacgatttaatagaagaacatttaaaacattcagtcaaagctgctattgaacacagaaactctattatgcatggtattaaaatcgaagagtacaattcgataattcaaacattatttgacgaaatagctaagctgtctaatgtatataagtctcttaataaacagtaagcaaaatcggattcttcattacataccgaatattcatcataaacactgactgcatcttctaagacattttttaaaattctaatgtcttcattcgttaaaactaattcattgaaattatgattgtttttaaatgtcataacatcacctactttttattttattatatcacatttagtacctagtactaaatttcgggtagcccgcctacccttattattttttgccaattttgaggagggagaagcaaaatgccagtatataaggatgataatacaggtaaatggtatttttccattagatataaagatgtatacggtaataacaaacgaaaaatgaagcgtgggtttgaacgtaagaaagatgccaaactagctgaaagcgaatttatacaaaatgttaaatatggatactcggacaatcaaccctttgaatatatattttttgatcgtttaaaaaatgaaaatctttctgcacgctcaatagaaaagcgaactacagaatataatactcacataaaagaaaggttcggaaatatccctattggcaaaatcactactacgcaatgtactgctttcaggaattatttgttaaacgatgcaggtctttctgttgactatgcacgatctgtgtgggcaggttttaaagcagttatcaattacgccaaaaagcattacaagctcttatacgaccccacattatcggtaactcctattcccagaacaaaaccacaagctaaatttatcactcgtgaagaatttgatgaaaaagtagaacaaatcacaaatgatacttctcgtcagctaactagactgttattttattctggtcttagaataggagaagctttagctttgcagtggaaagattacgataaaataaaaggcgaaattgacgtaaataagaaaatcaatttaagtaatagaaaaattgaatataatctaaaaaaagaaagctctaaagggataatacctgtaccaaatttaattagagagatgcttaaaaacatgtataatgaatcttctaaaagatataaatattttgacgaaaactattttatattcgggggtttagaacctattagatacgttacttattcgtatcattttaaatctgtattcccgaatctaaaaatacaccatttaagacactcgtacgctagctatttaattaataatggtgtagatatgtatttattaatggaattaatgaggcattctaacattacagaaacaattcaaacgtactctcatttatatactgataaaaaacatcaagctatgagcatatttgattaaacggtatcaaattggtatcaaataacaattaaggagtttataaaatgcgtaataacaagcctaaaataagtattcaaaacgacccatgggaagcatataacgatgttaaagaacatggccaattaactttaagtaacatcgaatttacaactacaaatctttgtaatatgcgttgtagccactgtgcagttggttatactttacaaactgtcgaccccgagcctttagatatggacttaatttatcgtagacttgatgaaattccaaatctgcgaacgatgtctattacaggtggcgaaccaatgttttctaaaaagtctattagaaatgttgttaaacctctattaaagtatgcacatcatcgaggtatatatacacaaatgaattcaaacctaacattgcctcaagatcgttatttagatattgctgaatatatcgatgttatgcatatctcacacaactggggaacaactgatgaattcgcaaatgttggctttggcgcaatgaagaagcaaccaccgttaaaagctaagttaaaattatatgaacaaatgatttcgaatgcacgtacattatcagaacaaggaatgtttgtatctgcggaaacaatgctcaatcaaagtacgctaccacatttacgaaaaatacatcaagaagtcgttcatgatatgaaatgtagcagacacgagattcaccctatgtatccagctgactttgcaagtcaattaaatgtgttaactctagcggaaatgaaaaagacaattcatgatatattggatttcagagatgaagatatttggatgttatttggtactttgcctgtgtttccatgcttaaaggatgatgaagatcaaaagttactatcacgtttaagaaatgctaaaaatgtaacgactagaaatgacccggatggccgtagtcgtttaaatgtcaatgtatttacaggtaatgtaatcgtaactgatttcggagatgaaacaggtacaatttcgaatatacaaaaagataaattaacagatgtatttgataaatggttatcctctgatcttgctaaatcattaaattgtcattgttccgagtttagttgtttagggccaaatgttcttgttaaaaatatgtactatccgaatatggattttaaagataatgagcgtcatatgcacaaacaaccacaaattatacaattttaaaaactcttaattatgcggagaagcactttatcgataagtagtctccgcatattttaatgctattataaaataaaaaacaattaattgctggcagtactctacttaaataataaagggcatttaataggactaatagtctataataaaaggggtaaattttaactaaaagcataaacgtgcataatcaaaaagacagattgtaggtggaatattcgaacataacagttcaattcatccttaacaatctgtctttatatttttagtctctaatatgttgcacttgagctaaatattcaattgtttgtttactttcaatgcgacgtgcttttcttcgttcaacacgttgtggtgctgtatcataaaaccatttttcaacatcatcttctggatatacaccaggtacatgtttaggtttgccttcatcatctaacgcaacaaatgttaagtaacttaatgcagctaaatcatgcttgttattaaatacatcgtcaattctaatttgaacgaccacttccattgaactagtcccagcgtatgaaaccatcgctacgtattgtaatatgtcccctgttttaatcggctttaagaaatctactgagtctgtagatgcggtaactacttgcgcaccagcatgtttcatagctgtgattgctgcaatttcatcaatattagccatcaatgtaccaccaaacattgtatgatggtgattcgtatcttgagggaaaacttgtctatttttataacattttgattctgacatagatttcattggtctgtcctgatttgtcattattttatctcccaatctatactttaatcacgtatttgacctttaaatacatgtttcatttcctactcagcacctcaaaataacatttattaaaatgttgatgcccaatttccattttcaaatactagttcttttgaaccatcttcgaatatgccataaatagtcaaatcactactaccaatcatgaaatcgacatgtacatttgaatcatttaatccgcttgcaatcttttcctcaacagtcatttccgttccaccttgaatattaaaggcgtaagcagatccaatcgctaaatgacatgctgcattttcatcaaataaagtattgtaaaaaatggtattacgatttgatatcggtgaatcatcaggtactaatgctacttcacctaatcttcttgaaccttcatcagtattgattaaatctttcaataccgcttcaccttttccagctgaaaaatcaataatctctccatctttaaacatcaatttaaattgatcgataattgtgccattataacttaaaggcaatttattagtaacatatccatctactctatttcgatctggtgctgtaaatacttcttcagttggtatattagcaataaaagcttgttccttgccgttaacataacttgtagcatcttcccagatatgatttttcgctaaacctactgttaaatcagtaccttcagatacataatgcaacgcatggtaatttttttgttgtaacttttgagcgtaaacacttaaattagcgatgtgttgacgccaattttcaactggatcgttaccatcaattcgcacaatatcgaatacctcgtcaataaacttaatatatgcttcttctacagatagttcaggatacactctcttcgcccaagctttagatggaaaagcagctacgacccatggaaattgatttttttgtacactttccatatatcctttaaatgcgcgtgcgttttgttgttgaaatgcttgtaatttttggctatcgataccatccattaaatcaggatcttcactaataagtgctaaattagcagcgccacgtttaacgtaatccattctcgcttcaacatcatatgattttatctcatgattagcaaaatgttccacagattcattttcaaattttaagcgttttaaggttggatcgctatatacaacacgtacatctgaagcgccacaatgatatgcttcttctacaattaaatgcgttaattctaatgtttctactgatgatctaataaatactggctgttttggttgaacattcataccaaccttaactaatagttcagcgtattgttgtaacttttctttgtaattagtcaaaattcccactcctattcgtgtcgcaattgtcctaaagcgtcagcaatagctgtcacttcacttggcgacaatctttctcttgattgaacaaaatcatatatatctgttaattcttcttcatttgcatttttatatttttcaggatctaataatccttgattaacaatatttaacttctctctaatagctaatactttctcttcatttgtcatagccacaatgttcacctctaataatagttatgttatcaaagtatcacaatttaataaactttaatagaattttatataatctgctttcttattgtttaaagtcgctataaaatggggatataactacatagtttggaggaatcaaaatggtagatgtagcatttgtctgtcttggcaatatatgtcgttctccaatggcagaagcaatcatgcgacaaagacttaaagacagaaatattcatgatattaaagtacattcaagaggtactggtagctggaatttaggagagccacctcatgaaggtacacaaaaaattctcaacaaacacaatattccatttgatggcatgattagtgaattattcgaagcgacagatgattttgattacattgtggctatggatcaaagtaacgttgataatattaaatctatcaatcctaatcttaagggacaattgttcaaactgttagaatttagtaatatggaagagagtgatgtaccagatccatactacacgaataattttgaaggtgtatacgacatggtattatcatcttgtgataatttaatagactacatcgtaaaagatgcaaatttgaaagaggggtagttttttatggaaaataaatttgttcctggtattttaattggtgccgtaattggtggtgcaattagtttagctgataaatctacacgtcaagctttagttcaatcagttaaagatgcaaaaaatggtaaccgcactcgtaagccttctaaagtcagcaagattaaagacgaagttttatactggaaagatgttgttgaagaaattcgtcgtaataatcctgaattagaacgttcattaaaggatgcgaaagaaacatttgttaatagaaaaaatcaacgctaagatgattttgtttttataaggcaatacttaacaatttggtgtacgcctttcatagttatcattattaaatgataatacaatgattggccaaactgcattgtttcagtattgcctttgttttaattttaaatcaaaatagcctatgaaagatttaaatcaattaatttctataatattatcatttttaaagcatatcattgtttagtttttttataattggataaatactaatagttactttataaaacattacatagagaaaggttaaggagtgcacatgtcgaaaaaggatcactcttcttcaaaataccttaattctgttaaggaagcgcaagaggagtcaaaaaagaaaaataaaagtaatcccaaaattgatgttgatcgtacatatattgaacctcaacaattccaatctaagaaacctaaaaaagatgatcaggttttcttcttatcaagattaaataaacctgcaaaatataagaaagactctaatttcttatcatatctcatctatcgcataggaaaagatgatgcctcaggactagcagcacaaatgacttaccatttcgtacttgctatgttccctatgttgcttttcctattaacattattaccatttttcaatattaagcagagtcaaattactaatatgttaagcaatgcacccgctgaaacatctactctaattaagagtgtaattggtgatataactcaaaactccagtggtggcttattatctatcggtttgattttagcaatttggtcagcttcaaatggaatgactgcaattatgaattctttcaatgttgcttacgatgtagaagatagccgtaatggaatcgtattaaaactactaagtgttgtcttcactgtagttatgggcgttgtgtttgtagttgctctagcattaccaacgcttggttctgtaattagtcatttcctattcggtccacttggatttgacgaacaagtgaaatggatttttaaccttattagaattgtgttaccaatcattattatatttatcatatttatcgtgttatattcggttgcacctaacgttaaaacgaagcttaagtcagtattaccaggtgcagtatttacttcaattatttggttagctggttcatttggttttggttggtatatttcaaattttggtaactattctaaaacatatggcagtatcgcgggtatcatcattttgttactatggttatatatcacaagttttattataattgtcggtgctgaaatcaatgcaatcattcatcagcgtagtgtaattaaaggtaaaacacctgaagaagcagcattagaacatgatgacaataataaaaatcattataatgagaacactagatacgaatatgatgaagatagtaatgcaacacatcaacgtacgtatcatgttgatgaacatcctagtgatacctatccagaagatgataaaaatataaaagacaaaatcgttgataagcttaaaaaagactaaacaccaacaaaacagaggttttcgctaatgattattgcgaaaacctctgttttttggtgtctatttgatgttatattgtgattggcgtaagtaacttttcttaattcgatatgaactattgaattaaattatgttggaatgcatagataacagcttgtgttctatcttgcacttctaacttacttaaaatgttactcacatgtgtcttaaccgttttaatagtaatatgcgatgcactagcaatttcttgatttgagtaacctttcgcaatcaataataatatttccatttctcgttctgtaagcatttcatataactctgcgcgctttttcatacggttacgcattttcactaaaacttccggttcaaaaacagattctcctctagaagttttacgaactgcatcggcgatatcttttgcacttgttgtttttaaaatgtaactatcgacacctgcatctaatgcacgatatacctctttatcttcaataaaactagttaacattaatactttaatttgcggtaaatcttttttaatctgagtcgtcgcttctacaccatccatgtcatccataagtaaatccattaaaattaaatctggcttcaactcatgggctttggcaattgcttctttaccagaagcgccttcaccaactacttcaatatcactttgcgttgatagataacttgaaattcctatacgtaccatttcatgatcatccacaaacaatactttaatcgtcatacgaatcctccttatttaaaggtgctttcacctcgatacgtgtacctgaatctggcaatgatacaatatggaacgttgcaccaatttccaaagctctttcacgcatatttttaagtccataactttgttctaatttttcatcaacattaaaacctttaccattatcttgaattctcaacaataaataatcgtctttattaaacaattctactgtcacttttgtaccgtttgaatgacgcaatgtattcgaaattgcttcctgtgtaattctgaacaaatgatcttcaatacctttaggcactttaaaatcttgtatttcatgcacaactttcattggcacttttttttgtaaatcaataactaaatctttaataccctcacctaaagatttgtcttttaaaccaagcggtcttaaatgtaacagcaaagcacgcatttctaactgcgaatcttgaaccattttctctaaaataggaatttgttggtctaatggtggttctaacttcgtttctttgatagcagatagcatcatacttgccgcaaaaagttgctgactaacagaatcgtgaagttctcgtgctagtctttgacgttcatcttcaataatctttttaactttcacatcattaatattataattttcattggttaagttttgagttttaagtcgcaacttatgcaattcttgatttaaaggtacgagtgtatggtataaatctaacgtttcactatatatttctatattttgatcattaatgccaactgtttcgccttccattgaacgctcaatttgcgtcttaatccaatcattttgctgattgattttgtaagcgagtaccgaaccaacaataatacacaataatatgatgatgagatttaaaaataaaaaaactggtattccgaatatttgtgtataaaacataccttgaaaatagatgatatttacaaaaactttatcgatgaacagaaatgcagctagcatgctatatactaagatgagcattgaaccaattgttctaatgtagtggttcatcgataaatcacctctacgtctccgataaacgttgatacgtagatattaactgtatagttatccggtttcatcatttcttcaatatgaatattgttattttcaactttatatgatttttcattcacgtaagtacttccataaaaagcagctacatgtaaattaatattgtaattaaccggcaatataacctgcactttacctaaaatgtgtctaacaacaatggtattattttccttaatatttgcagcttttgttaagtcaatatgtaggtcgccaattccatgttgaatttgtacatcttcccacttatatacataaactggtgtacgttgctcaccaaaccacttttgtttaataaaagatggtgaagtcataacctcatccgtcgcaactactttttttggtttaaacttgtgtattaaataacgcacaataagtaataataaaaagacgaacaagatgatgattgtatacttattagacaataatgtgaatgcaattaatagcgcgcctatccaaaacgccaaaaggccacgtattttatgaaaataaagatatcctacataaactaatacacatcccaataatagaacgagtaaaaagccaattttttcaaaaaatatgtagtaaaaattggcaataatcattaatgcagtaaaaatgatcaacatttgcgttgatatatatttgtgtgtcatgtttcgccgcctttctatgccacagcgttcatataatttattagatacgatgttttttctgttgctattttttcagttgaagtttgttgaatttgagtttcaatttgtgcataatatgcttcaactttattcaactctgatttaatattttcaatttcttgattattgatttctcttgcacattgaatttgaaatgcttcagcaatatcaatatatttattttctaatgttagcattagactgtcaattaacttgctaagttgttcttttttagtaattaaataacgcatataatcatctaaatttttcattttttcatctagcattaaaaggtagtgcttgatattatttcttactgttgctctcaaaaactgttcaatataacgttcaacatagttcataactatcaccttttataataagttttaaaataccaaatgcgctatgtatcttcgttgatgtcgatgatatgtttgcttaaaaactactttgttacaacatatttttgaaatgacgcattgattgtgttcttaattattataaaacagttccgaaaccaatatgaataggctccggaactaaatgatgttcatactttagtcttagtatatgttgaactattcttcttcaatctttgtcgttaaaatcggaccatccttagtcacgataaccgtatgctcaatttgagcaacaaaacttttatcgctcgtttcaaaagcccattcatttttaccttctgtaacaaatgatgcatttgatgagataaacggttcaatagctaataccataccttcagttaataatgttttgtcttttggatcaaagtaattaagtacatgtgctggtgcttcatgtaatgataaaccaacaccatgacctgttaagtttttaatgactttcaaatcattttgtctagctgtattatgcaccgctttaccaatgttacttaacttagtacccggttttacttttgcaattgcattctcaaatgccatcgttgctacgtcacatactttttgtttcattggatcatctgattctccaacgacaaatgaaatgcctgtatctgcataatagccattcttcaaagccgatacatcaatatttactaaatctccttcacgaatgacacgcttacttggaatcccatgtgccacctcttcattgacactaatacacgtttgaccaggaaaattttcatcatgaattggcgcagaaatagcaccgtattcttcaaataactctttcgcaatattatcaagctctttcgtagtgatacctggtttggttgcagcttgcattgtattgcgcactttagcgcatatgtatccaatttcttttaacgcttgtaattcttcttctgtttttacaatcattttatcccgttccttttttatataattataacttattatagcaaaaattctttgatatactaaagatgttactttagtattttggaaagtgagtgagacatagtgtgataaagaaaaaatatttctttatcgttgtaccccaacttgcattgcctgtagaaattgtagatccaatttctctatgttggggccccgccaacctgcacattatcgtaagctgacttttcgtcagcttctgtgttggggccccgccaacctgcattgcctgtagaatttcttttttgaaattctctatgttggggccccggactataattgaaaaatgcttgttacaagtgcattttatttcagtcaactactaacaatataacattgtggagcccagaactttgattaatgtatatgaaaatcaaagtaatgcttatgtatgattatttcaaatattttacatacatgaacttttccaatgtacgatactattattataaagcgctcgctaagattttacgatgattagaggttaaaaaatgaacgatcaatggtataaacatttaattggtgccagaacaattaaaactggtattgccatttttttaacagctgtcttttgtatggcactagatttaacacccatctatgccattttaacagctgtagtcacaattgaaccaactgccaaggcatcacttattaaaggttatcgtagattacctgctacggtaattggtgcaggctttgcagtattatttacatatttattcggcgatcaatcaccttttacatatgcattgagtgcaacgttcacgattttattctgtacaaaactcaaattgcaagttggtacgaatgtcgctgtactaacatcattagctatgattccaggtattcatgatgcctacatattcaactttttgtctcgaacattgacagcaattattggactcgtgacatcaggtttaattaacttcatggtgtttccacctaagtattatggtcaggtcgaagaaaaattaagtaagacagatgccttgatgtataaattattttacaatcgctgccaagaacttatcttatcaagactgcaatctgataaaagcgaaaaagcatataaaaatattttcaatttaaataatcaagttgaaacgttaataagttatcaacgtgatgaattaagctatcataagaaaaaagaatgtgattggaaattactcaatcaattaactaaacgtgcatatacgaatcgtttgtttatcactcatttatcaaatatcatttacttgcctaaaaatactcgtgttaacttttcaggtgacgaaaaaatggcattgctaaaaattagtagtagcatcaaagatatattttatgatggttcttttaagagagaagatgattctgtagaaactttacgttcgactataaaagcacttgaaattagtggtgaaaatcaaattaaaagtcatatactatacgaagttctaatgatttatcgactgctagacagcagatatgcttaatttaagtaccttatgctaattggcaccatgggagtgggacagaaatgatattttcataaaatttatttcgtcgtcccaccccaactcgctttgcctgtagaatttcttttcgaaattctctgtgttggggcccacaccccaacttgcattgtctgtagaaattgggaatccaatttctctttgttggggcccctgactagaattgaaaaaagcttgttacaagcgcattttcgttcagtcaactactgccaatataacttcgtagagcatagaacattgatttatgtccccgcctctttttatcgtatatagcatgtccctttttaaaattacaagcataaatattcagactcaaatatagccacacgcctaaactacggagggatgtggctgtcttttttgattgtaattacatatcagatttaaatcattaatgtaaagaggctaattcattaataaatttagtaaaatctgatttagcaacatttatccttaatgaaataccagattctgttgccatgtttgaatgccttaaaccagaatcaaaatcaatataaatacaaagcagttcttgattaaaatcaataattgtaaaatgtaaatcaggttctataaaatatatttcagtaacaggattgtcgcaatccatatgtttcaaattgtccatgtcactatcaaagagtgcaaattcaaatttaacttcttgatcttcgaaagttgcactagtgtcgaaataataaattttattatcttcttcgataactacatcttttaaaataaatgttatcgatgttttgctatgtaaataagatgcatcttttaatatcactttagtaggcttcatcgtcaaattcctttcatcattcattttttcatgttgcataatcaccattactattgataattctaggatagatactcattgtataataattattcactagaacaaaaaaacacacatcaatttggttgtttccatccaaaataatgtgtgtgtttatacatatatgattaattactaaacttcatcgtttatcaatattaaatccattgatgcgatgttcagagttaacgagatttcttctgtctatttgctctgtctattaatacttgtttcgcttgtatttccgcttcattatctatttctttaggctcaaacggaatacccttacgttcacaagctttttctaacagataatcagtgatttcgtaatttttaggtaaaattggtccatgtaaataagtacctaataaatttttataatgaatgccttcttttttatcttcatcattattaccataaccaaaagtaacatgaccaagtgtaccgaaatcatgatatgttctaccaccgtgattttcaaaacctacaatagttccaaaagtatcactttcgataacaatatctcctgttaatcggtttgtctttgattcagtataaaaatctaaaatacctaacccttctaattctgtaccatcaggcgtgatatattttttccctaaaaattgatagcctccacaaatcgttaatcccggcataccatcttcaatcgcttctttaagtggtgtcttaattttacttaattcttttgttgctaatgcttgttctctatcacttccaccaccgataaagaaaatatcacattcatcaaaggtaataccttctgtttcattgatttctacgacattaactttaatatttcgttttttagcacgttgtcttaaagcaataatatttcctatatcactgtataaattcaatttatctgacataaaatgataaatagtcaattcatgcatattatgattgacctccttcaaacgaacggtttaattgttcaagcataggcgctaatgatgtatagtttggtattgcaactgtgaaacctttataatccatagtctttgccgttgctttataaatatcacgctcaactataattggtacttcaacctctgctaacttcaatcgcaattgaagttcttctgctcgtgtacctgtcacgatgatagcttcaatttgttgcttagataatttttcaaaatctgcatcataaatccatgaagtatctcgaccatctgcagcgttatcatttagcgaaataacatacactttttcgccttctaattgttcaccaactgataaacttgcattcattcctgcaggatttttagctaaattgatcatcgcttcttttcgttcttttttaaagtactgcatacgaccattgtctgatgtatacgtttcaaagccatttttaattgtttgttcatttaaccctagctctcttaaaacagtatatgctgctaacgcgttataagcgttaaagtcacctgcaattttcatatcatatttttcatcattgatatttaaatataaaaacggtgccacatcaaaacttgatatttcatattttgcttgctctcgtttgaaaccacactgacagtgataatgaccaatttgattataatgaatataatcgtattgcaataagcgaccacagtttggacaatatctactttcattcatcgtactttgttcaaattcatgggcatgtgctttcataccatagtacacaatcgtatcacttgcgattttcaaacgactcacaaatggatcatcagcatttagcaataatttgatgcctttattactaattgtctctgcaatgttattaaccataatatcaatttcaccgaagcgatccatttgatctctaaagaaattagtaaataccatcattgaaggtgtaacttcttttaacacacgtggaatcgaaccttcatcaatttcgattaccgcaattttagtcttaggtgttgattgcatgatgaatgcaaaagttatacctgcagccatattagcaccttcattattgtgtataatttgaatattatttgcttttaaagtatgtccaattaagtttgaagtcgttgttttaccatttgttccactgataaatacaatatcatcaacttgctctgctaattttcttaatatatctgtatccacttttctagcgatttgtccaggtaaatctgttcctcttttacctactgctctacttgctttacgcgccaatttcgctagatggattgccgtccactgtctcatgtgtttcctcctcaaatttccactcgcatcattataacatgacaaggcaacttcaaaaaagtttctcaatcacaaattgatacagtgtttctaaattataatcattctcatttagataattaaaaatgatatttattctcaattaaatatcgctaaatgatacattttctcaattagagtgctaaaataaggcattaaattataattattattatttacaattgagaatgagtttgttatactaagtttaattcatagtaattttaatttacaaataagaggtgtatcaaaatgttaagtaaaaatttattagaagcattaaatgatcaaatgaaccatgagtactttgcagcacacgcatatatggcaatggcagcatactgtgataaagaatcgtacgaaggatttgcaaacttcttcattcaacaagctaaagaagaacgtttccatggacaaaagatttataactatattaacgacagaggtgcacatgcagaattcagagcagtttcagcaccaaaaattgacttttcaagcatactagaaactttcaaagacagcttatctcaagaacaagaagtaacaagacgtttctataacttatctgaaatcgctcgtcaagataaagattatgcaactatctcattcttaaactggttcttagatgaacaagtcgaagaagaatcaatgtttgaaactcacatcaattatttaactcgtatcggcgatgacagcaatgcattatatctttacgaaaaagaacttggcgctcgtacattcgacgaagaataattaaacatcactacaatagacagataaatatcatacgacatgataggcatttgggtcacttacaataacccaatgtctatattattttgctttacggagatcactagattcattttctgaatcattgatctgcgttttttcattttcaaggctaattattgtatttttagtcatttattttttaaactactaatgttaataactctaaatttgatgttgaattaatttgacgattttaaagcatatcatcatttactttttaatcagagttacatccaaatgatagatttcacgttataccttcacgtataatattatgtatcgtttgtaagcaaatgactaaaagtctattaatatatacatttaattaattgaaaggattgactacatgatacaagatgcgtttgttgcacttgattttgaaacagcaaatggtaaacgtacaagtatttgttctgtcggaatggttaaagtcattgatagtcaaataacagaaacatttcatactcttgtgaatccgcaagactatttttcacaacaaaatattaaaattcatggcatacaaccagaagatgttgaaaatgcacctacgtttgactacgtatttccatatatgatgcaatttattgcagatttacctgttgtcgcacataacgcggcatttgatatgaacgtcttacatcaaagcattcaaaatattggtttaccaactccaaatttaacttacttttgtagttatcaacttgctaaaagaaccgttgattcgtatcgatacggtttaaaacatatgatggagttttatcaattagattttcatggtcatcatgatgcattgaatgatgccaaagcatgcgcaatgattacttttaggctactgaaaaattatgaaaatttaacatatgtaactaatatttatggtaaaaatctaaaagataaaggctaggactaaataaaatactcccttcaaaagtaagcattgtaaaaatgtaaactttgcagggagctttattttatataaagtcatatatcgtcatatttttataagttgattgttctaaattacctacagtgacaccaataagtcgaattggtacatcagggtcttttaaatcgttataaagtaaatatgcaatattataaatatcttcttcagaactaaccgaatctcttaaactcatctgtttagatagcgtttcaaattgataagttttaattttaaccgttacagttttagctgacttctgtaatttatttagacgttcagctgttttacctgacaattcccatacttttcttaaaatctcttcatcatcattcacgtctgttgcaaatgtgcgttcagtccctactgattttcttactcttgatgatttcacttcactatggtcaataccgcgtgccttgttatataaaccccgacctctttttccaaacaaacgtattaattcaaattccgttttctcatataaatctctaccgttaaaaataccattatcatgcattacttttttggaagctttacctacgcctggaaaatctccaatatccaatgtcatcaaaatatcatggacattttgataatcaatcacagtcataccatcaggtttattcataccactcgctaatttagctaaaaatttgttataagaaacacctgcagatgctgttaaatgtgtctgctctagaatatcttttctaatatactgagcaattttcgaagcaggaaggtctggtctcactaattctgtaatatctaaatacgcttcatccaatgacatcggttctaccttatctgtataacttcggaaaatagacataatctgcgcagatgtttctcggtaagcaccaaaattacttgtgacaaagtatccatttggacataatttatgcgcttgtgacataggcattgctgaatggacgccgtattttcgtgcttcataggatgccgtagagacaacacccctactgcttgctttaccaccaacaatgactggtttccctttcaatttggggttatctctcatttcgacttgtgcaaaaaaatagtccatatctatatgaataattcgtctctcagtcaagtgctcacctccctactaatttttacttttataacgcacaaaaatatctcaacataattatacgctgtgtacgatttttttacataaatcttgcacttagcgataactatattgagataactacaagttgttataaaatcaattgctatttaagcatgatgatgaagacgattgagtaagaaaacataggtaatctgaaataattcaagcaaattcattttgttggtatcatcatattaaaatttattattgagtcggcttttgatgatacaaataaatactatcttcatcttgttgaacatatttaaaactactagatattgttaatgcaacaagcagaatatctataaagcaataagcggtatgcatactaaacataaaaataagtgatgaataaccaaataccttaattaaaataagcaagccagtacttaataggattagtggtgacagcataataattgagaattgccatttgttgaagcaagcatctgctgtttggaataagattctgtctttttttatattaaacataggtttgctatcttttttaaataaaagaaataatgctctatggataagttcatgtaaaatcaataaaataatgaatccagcaaacccatatacaagattgatgatgatattttgatcgacaaccgctgtgacacctaacgcccacttatacgtaaataaaatcacgaataacgcaataacaagttgcaagataataaaccttcgcatttgaaaattatttgtcgttaaatcaattttatgcattaccaaccctcccgatcatgacattcttattcttctttaaatatagtatacaatgtcacatttaatttaaaaagttcatatcaagaaagtaaattggctgtaataaaattttaatatacgacttctttcttcacttattaaggcgaaattttatctcaaatcatgtgcgctatttcaaattgaataatgccactgtctcaacatgtgttgtttgtggaaacatatctaccggtgttacctcttcaagttgatatttttcagctaataataatgcatcacgttgctgtgttgcgggattacatgaaatatagacaatacgcttaggttctaatgtaagcaaagtctgaataaacgtttcgtcacagccctttcttggcggatcaaccattacaacatctggtttaatcccttgtgctttccattgtaaaataacttcttcagctttcccacagacaaaagttgtattattgcattggtttatagtcgcattttgttgtgcgtcttcaattgcagaaggtactacttcaacaccgtatacatgttttgcaagtggtgccatatatagccctattgttccaataccacaataggtatctaatacaacttcattacctgtcaattgcgcatactcaattgctttattatataatttctctgtttgttcagaattaatttggtagaatgactgatcacttattttaaatgtactatctgttaattgatcaataattgtatctttaccatatagcgttatagattgacgtcccataataacattagagtggctatcattaatgttttgtttaatgcttgtcacattaggaaatgcatctaatatcttctcaacaacagcatttttttgtggccactttttaccattagttacaaaaataatcatcatttcgtctgtatgatatcctgttcttacaaccaaatgtctcattaaaccttttttcaattgttcttgataaatacttacatttaaatcttttaaaatagatttaacttcattcatcacttcttgatgttgtgaatcttgtattaaacaactttccatgtcaataatgtcatggcttctttgacgataaaagcccataataacttcattctgttcattcttaccaactggaatctgggacttgtttcgatatctccaaggatctgtcatgccaactgtatcgttaatcttagaattatcaaaatgcgcttttcgctgaaacaaattaatcacttgttcctttttcatttcaagttgtgcttcgtatgataagtgttgaagttggcacccaccacaacgttcataatatatacatggcggtgcaacacgattctcacttctcgtatttatattaagcaacttacctatcgcaaagttcttttttactttgataattttatattcaatttgttcattaattaaagcttgtggtatgaaaataggaaagcgatctatttttacgacaccatggccttcatgcgttaaatcaacaactgttcccgtttttatgtcatttttagctattgcttgcaaaattttacctccaaaatgaacaggttaggaacaaaattatgcgcttcctaacctgccattatatatttcactatttctgtttattcttcgattaaattgtcatcaacatgatcattatttattaactcttcatttacaatatcattaggtgcaaagacatctatatgacgttctagatttaagaaattcgctggtaatttaccaccatattctccatctacatttagttgtaagtctgtgaatgatgaaatattaattgcctttgctttttcataaataactttaggatgcttagtatgttctcctcttgaagctaaagtcataatatgaccaagttctgcaaggtttgatttttcaactataattaacgtaaaatagccgtcatctaacttagcgtccggcactaatttttcaaatcctgccattgaatttgttaaacctaaaaagaataataatgcttctccttggaaaacattaccatcatattcaattcttaaatctacagctttcatttgaggtaacatttcgaaacctttgatgtaataagcaaatggaccaacaatagatttcaatttactcggtgtttcataagagacttgcgtcaattgtccgcctgcagctaaattaataaagtatcgattattcattttaccaatatctactttagtagaatgaccttcaatgatgacatcaagtgcccccatgatgtcattaggtatatgcaatgcacgtccaaagtcattaacagtacccataggaatgacacctagcttaggacgattaggcttttctgcgataccattaactacttcatttaatgttccatcaccacctgcagcgattaatacatcataattttcatgcatagctctttctgcttcaagtgtggcatcacctattttctcggttgcatatgcactcgtttcatatcccgctttttctaattttattaaggcatcaggtaattctcttttaaatagctctttacctgatgtcgggttataaatgattctagcacgtttcctcatatcttatccctctacttaaaattcatatattttaacttcatctttgtttcgtctaatagggagtgggacagaaataatatttaacaaaatttatttcgttctaccccaacttgcattgtctgtagaatttcctttcgaaattctctatgttggggccccaccccaacttgcacattattgtaagctgacagaaagtcagcttctttgtttgggggccccgccaacttgcacattattgtaagctgacagaaaatcagcttctatgttggggccccactagaattgaaaaaagcttgttacaagcgtattttctttcagtcaactacagccaatataacattgtagtgcctaggacattgaatttatgacccaggctcagtcttatttcatcattcttaatatcgttaaagaccaacttgtatcttaaacaaatactatctcaatatgtacaaagcttgttatttattcagcattttttgccgttcttcattatatagacttcgtcagttatgctattttacctttaaaatgatgttgtaaatataatgttgtctttatacaaaaatgttttatacctttttattatacagtttgccttaatataattaaagctaacgcattaataaaattaatatttttaccattaacatgtacaatgaataaagttaaaagtaatttgacttctatagatataaataaaccctcgattgcatctaagtcagcaatcaagggtttattttttaaatcttcatagtttgatgatttaaattatcttttatctaattcttgttttaatagttgatttactaattgtggattagcttgacctttagacgctttcataatttgaccaactaagaagcccatagctttgcctttaccatttttgtaatcttcaactgattgttcgttattgtctaatgcttcatttacaaattttagaagtgttgcttcatcagaaatttgaactaagccattatcttccataatctgtttagcattaccacctttagctgctaactctgggaagactttcttcgcaattttactgctcattgttccgtcttcgataagtttaatcatacctgctaaattttctggtgttaatttagtatctaataattctacttgatttttatttaaatattcgtttacgccacccattaaccagttagatgttaatttaacatctgcaccgtgttcaattgttgattcaaagaaatctgacatttctttagtcaatgttaatacgtgtgcatcgtatgcaggtaaacctaattcatttacatacttagctttacgttcatctggtaattcaggaattgtctgacgaacacgctctttccaagcatcatcaatatataaaggtacaatgtcaggctctgggaagtaacggtaatcatcagaaccttctttaacacgcattaaaattgttttacctgtagattcatcaaatcgacgtgtttcttgtccgatttctccaccatttaacaattcttcttcttggcgtttttcttcatattctaaacctttacgtacatagttaaatgagtttaagtttttcaattcggctttagtaccaaatttttcttgaccatatggacgtaaagagatgttagcatcacaacgtaaagatccctcttccatcttaacgtctgatacaccagtgtattgaataattgaacgcaatttttctaaatatgcatatgcttctttaggtgaacgaatatctggttcagatacgatttcaattagcggtgtaccttgacggttcaagtcaactaatgaatactcacctttatgtgttgacttaccagcatcttcttccatgtgaagacgagtaataccgattcgttttgtttcaccgtcgacttcgatatcgatatatccattttcaccaattggttgatcaaattgagaaatttgatatgcttttggattatctggatagaaatagttcttacggtcaaacttagattctgttgcgatttccatatttagtgccattgcagcacgcattgcccagtctactgcacgcttattaacaactggtaagacacctggatatgctaagtcgataacatttgtatttgagttaggttctgctccaaaatgcgctggtgatggagaaaacatttttgagtccgtttttaactctacgtgaacttcaagtcctataactgtttcaaaatgcatgatttccactccttataatttttcataaacgtcatgtaaattgtattgtgtttcatattgataagcgacacgatataacgttttttcatcgaatggtttaccaatgaactgtaaaccgattggtcggccatttgattgtccacaaggaacagaaataccaggtaatccagctaagtttactggtgttgttaataaatcattggcatacattgttaatggatcatcaatttcttcacctaaattaaacgcagttgtaggcgctgttggaccaactactacatcataattttcgaatactttatcaaagtcatttttaatcaatgttctaactttttgagattttttatagtaagcatcatagtaacctgaacttaatgcaaatgtacctaagaaaatacgacgttttacttctttaccgaaaccttcagatcttgacattttatataattcttctaatgaatgagcttctttagaatgataaccataacgaattccgtcaaaacgagaaaggtttgacgaagcttctgatgatgcaatcacgtaatatgatggaataccaaatttagtatttggcaatgatacttcctcaacgacagcacctaaagattttaaagtttctacagcgttttgaactgcttcttttacgtcatcagctacaccttcacctaagtattctttaggtaatgcaacttttaatcctttaatatctttaccaatttcagatgtaaagtctacatcatcaactggtgcacttgtagagtcattaacatctgcaccagaaatagcttctaatacgattgcattatcttttacatttcgagtcaatggaccaatttggtctaatgaagatgcaaaagcaactaatccaaatcgagatacacgaccgtatgttggtttcataccgacaacgccacaatatgcagccggttgtctaattgaaccacctgtgtctgaacctaagctaaatggtactaagccagctgcaactgctgctgcagatccacctgatgaaccacctggcactgctttatggtcaaatgggttaactgtttttttgaaataagatgtttctgttgaaccacccattgcaaactcatccatatttaatttaccgattaaaacggcattttcattatgtagtttttccattacagtagattcgtaaattggcacaaaaccttctaacattttacttgcacatgttgtttctaatccgtttgtaataatgttatcttttatacccattggaataccaaataatttgccatccatttgatcttttgcttgtaattcatccaattcttgcgcttttttgattgcattttctttatccagcgctagaaaagacttaattgttggatcagtctcttcaattgcatcatatatatctttaacaacatcagatggtttgatttttttgtcttttattaaagttaataaattctcaaccgattcgtagcgaatgctcatcttacgcgtcctcctcattcatgattgtaggcactttaaattgtccatcttctgtttctttggcatttttcaaagctaattcttgtggaatacctttaattgctttatcttcacgtaaaacgttttgtaaatctaaaacgtgatatgtaggttcaacgccttctgtatcagcgctatcattttgttttgcaaaatctaaaatgctttctaatgtgttggccatttcttccgtttcttcaggagaaatttgaagtcttgcaagattcgcgatatgctcaacttcttcacgtgttacttttgtcattaataaaagcctcctttaagtcattcatcactaaattgtatcaaatttccaattaaaaatctaagtatttatgaggtgctactttaatttcatataaactgtataaacattatcattcgtttatcaaatcattttttatgaaaacaacactcttttaatattagacaacccaattcaatattatgattatgcaattttaattataaaaatttgctcatatccaaaaaatacgaaagcgctttctatattggtatgcaagtatttcaaaaagaataaatttaattttcctacttttctaaacatttatctttatgtataatgttttcaagtaactaaattataaattaaataaagggagtgtttatcatgcttacaatggggacagcattaagtcaacaagtagatgccaattggcaaacttatattatgattgccgtctacttcttgatactaatcgttattggcttttacggttacaagcaagcaactggtaacctaagcgagtacatgttaggtggacgtagtattggaccgtatattactgcattatcagctggagcttcagatatgagtggatggatgattatggggctacctggttctgtctatagcactggtctatcagctatgtggattacaatcggtttaacattaggtgcttatataaattactttgttgttgctcctagacttcgtgtttataccgaattagctggagatgcaattacattaccagatttctttaaaaatcgtttaaacgataaaaataatgtgttaaagattatttctggattgattatcgtagtattctttacattatatacacattctggtttcgtatctggtggtaaactatttgaaagtgcttttggattagattatcatttcggtttaatattagttgctttcattgtcattttctatactttctttggtggatatttagctgtatcaattacagatttcttccaaggtgtcattatgttaattgcgatggttatggtccctattgttgctatgatgaatttaaacggctggggaacgtttcatgatgtagcagctatgaaacctacaaatttaaatttatttaaagggttatcatttataggaattatctctctattttcatggggattaggttatttcggtcaacctcatatcattgtaaggtttatgtctattaaatcacacaagatgctacctaaagctagacgtttaggtattagctggatggctgttggtttattaggcgctgtggctgttggtttaacaggtattgcattcgtacctgcttatcatattaaactagaagatcctgagacattattcatcgtgatgagtcaagtactcttccatcctcttgtaggtggtttcttacttgctgcgattctagctgcaattatgagcacgatttcttcacaattacttgtaacatctagttcactaacggaagacttttataaattaattcgtggtgaagaaaaagctaaaacgcaccaaaaagaatttgttatgattggaagattatctgtattagttgtagcaattgttgccatcgcgattgcatggaatccaaacgacacaattctaaacttagtaggtaacgcttgggccggatttggtgcatcgttcagtccacttgtgctatttgcactttactggaaaggtttgacacgtgccggtgctgtaagtggaatggtttcaggtgccttagtcgttatcgtttggattgcatggattaaaccattggcacatatcaacgaaatattcggcttatatgaaattattcctggatttattgtaagtgtaatcgttacatatgttgtaagtaaacttactaaaaaacctggtgcatttgttgaaactgacttaaacaaagttcgtgacatcgttagagaaaaataattcataagtcttaacaaattaaaaaggtactaatgttaatcaaaattatgactaacattggtacctttttattatctttaatttacaattaattactgtaaatatgaacttgcggttctttgtcatcttttgtcttactaattaaagcacgtggttggttaccatctttaatacgaatttcatagttatcgattttatcgaaatatttattcgcttgttcagtaacgtactgtgtaataccaattgtttcagcttgtccatagtaatcgattggtaaatctactactaatcgttgtggctttttatcaacaaatttaactttccctactgcttgtgtgaaattagaaaaatatgattgcaaattatcattaaattgcttgaaattattatttaaattttcatcataatctgctgctgttgaagaaggtaataaagctgatttttcattgatattatgccattcattaagctttgtttgactcttttctgcagtcgcttgagtgataaattcacctggtgtgattgaatcttcacttgattgcttataaattgcaaaatgaattggtatatcttttaaatcatcattttcacgtaaccttgataatatctcactagccatttgtttaccttgctttttaacttcgctatcatctagttttttactaaaagtcgatccatctttttcttttttatagtaataaacactattcatagctaaaccaatcgtcatacctttaatattcttaccttttgtatctccaccaccataaaaatcttgctctaaaatgttagataaataggctggtgatttttctgcaatcttttcaggatctgtttcaccttcgtgtgatggattaagtcctaaattttcattcgctttcttgtcttttttatctttttcagacattttatcgatttcacgttttgtatacttaggatttaaataggcattaattgttttcttgtccaaaaattgaccatcttgatacaaatatttatctgttggaaatacttctttacttaagttcaataaaccatcttcaaagtcgccgccattataactatttgccatgttatcttgtaaaagtcctcttgcctggctttctttaaatggtaacaatgtacgatagttatcaccttgtacatttttatccgttgcaatttcttttacttgatttgaactattgttatgtttttgattatcttttccagcctggtcatccttatggttaccacaagcagcgagtataaagatagctgtaatcaataatactaatgtacgcttcatcgacatacccctctaactatttaattcattttgcttatctacaaattgttgctctgtccaaatttcaatacctaaactttgtgcttttgttaattttgaacctgcatcttcaccagcaataacgacatctgtatttttagtaacgctacttgtaactttagcaccttgtgatgcaagccatttagatgcttcattgcgtgtcatttgatgtagcttaccagtcagtactatcgttttaccactaaattcaggatgtccttcaatatctgatgttttgatacctttataaatcatattaacatgtttatcttttaatttttgaattaaagcacgaatatcttcattttctaaataagtaactacagattgtgctactttatcacctatatcatgaatttctactaattccgcttcagttaccgttagtaatcgatctatcgtttcatatttttctgctaacacttggctcgctttaacacctaaatgcctaatacctagaccaaataataaattttctaaagagttgtccttagcttgttgaatggcagctaataaattatcaacttttttctgccccattctgtctaaaggtaataaatcttcttctgttaaatagaaaatatcagcaacatctttaattaattcgctttgataaagctgttgaataattttagtgcctaaaccatcaatattcatggcttgtcttgatacaaagtgaatcaatccttcaacaagttgtgcttggcattttggattaatgcaacgaagtgctacttcgccttcaatacgtactaattcatgtccacaacttggacaatgggttggcatatgatatgtgacagcatcctcaggtctacgttctggaatactacgtacaacttcaggtatgatgtcacctgcttttttcactacaacactatcaccaattcgaatatctctgtcatgaattaaatcctcattgtgcaaagatgctcttgatacagttgtaccagctacttttactggttctaaaatagcagtaggtgtgactacacctgttcgtccaatacttaattcaatatctaataatttagttactacttcctcagctggaaatttataagcaatggcccatctaggagatttttgtgtgaatcccatctcatcctgttgatctaaatcattaaccttaataacaatcccatcaatatcataaggtaatgactctctttggcttgtccatttttcaatatactctaaaacaccatcgatattatttacacgcgctctatttttattcgttgtaaaacctaatttatctaactcatctaatgcttcactttgcgaacgcgcattgaaatcagtgaaatcattgacactatatataaatacgcttagctttcgttttgccgttaatttagaatctaactgtcttaatgatcccgcagcagcgtttcttggatttgcaaataactgctcatcatttttttctttttcttcatttaatcgtaaaaatgaacgtctcggcatatatgcttcaccacgaacttctacatttaatggttctttcattttcaaaggtatcgcatgaattgtttttaaattttcggtaatatcttcacctgttgttccatcaccacgtgttaaaccttgaacgaagtatccatcaacatatttcaatgatactgctaagccatcaatttttaattcgcacatatattcaacgttgccaatttgttcacgtatgcgttggtcgaattttctcaaatcatcctcattaaatgcattccctaaacttaacattggcgtgtcatggttgactttattgaaagaggcttgggcttcaccgccaactctaactgttggagaatctacagtcttatactcaggatgctcctcttctattttaatcagttcatgaagtaatttgtcatattcactatctggtacagatggattatcctctacatagtattcataactgtattgatttaataaatcatgtaactcgttcacacgagacgataaatcagccatcccttaatcctcctttttttcaattggtgcaaattgcgctaacaaacgttttggcccttgtgatttaaagataatatctagttcgattgagccatttttctcgtttacattactcaccatgccttctccccaggctttatgcatcactttgtcacctacattccaatcagatgacaatacttgttttttcgttgacgttgttcgttgactaaatccgcgtttagcaaaaggttttgccttaggttgtatcgtttgtcgtttgccacttgaatgattttctaatagtgattctggaatttcctttaaaaatctggatggcatatttgactgagggcgaccaaataacattcttgatgtcgcatgagtgatatataacacctcttcagcccttgtaattgctacataacaaatacgacgttcttcttgcatttcatgatcatcttcactcttaatcgctctaatatgtgggaataaagattcttccatccccattataaagacaattggaaattcaaggcccttagccgagtgcatcgtcattagtgttacgccattttcagtatctgcctcatcaatatcagctactaacgataaatccgttaaaaagttaattaatgactgttcttctaatggggtattttcctcatagtcttttggtactgacataaattcatcgatgttttctaatctacttcgagattctaatgtattttcacgttcaagcatttctcgatagccagacttttgtaatacttcatcaactatttcatgaatttctaaaaattcttgttcttttatcaagctttggattaactcgtaaaaattaagacactcttgtgtcaccttttttgacaatccgataaaatcagcttctccaagtgcatcaaacatactgatattgttttgaagtgcatagttttgaactttttcaacagatgaaggacctacacctctttttggaacattaataatacgttgcaaactaatgtcatcattactattggcaattatacgcaaataacttaataaatctttgatttctttacggtcatagaacttttggccaccaaccattgtgtatggcatattagatttcatgaatgtttcctcaagtacacgtgattgtgcattcgttctatataaaattgccatatcttgatatttcttaccattacgttgatgcttcataatttctcgtattacaaattccgcttcatcacgttccgtcattgcttcatagtaatgaattttctcaccattcgtatttgcagtccacagtccttttggcttacgttcagaattatttttaatcacttcgttagccgcatttaaaatcgttttcgtcgaacgataattttgctctaaaaagattgtattcgcttctggatagtctttttcaaatgataagatattttgaatatcagcaccacgccaaccataaattgactgatctgagtcacctacaacacataagtttttaaacttacttgctaataatttaactaatgtgtattgtgctttattagtatcttgatactcatctacatgaatatattggaatttgttctgataatattctagaacttctggtacacgctcaaataagttaatcgttgtcataataaggtcatcaaaatctaacgcttcattacgtgacaattggcgttgatatccactataaaccgttgctaccatttgcgagtgataatctgtggcttctttttgagcatctgcaggtgttttaagttcatttttcaaattactgatcgcaccgataaacatacgaggttcaaactttttactatcaatattttcattttttaagacgtctttaataacagatttttggtctgtaggatcaattatcgtaaaattgcgttctataccaattcgatctgcatcacgacgtaaaatacgaacacacattgagtggaatgttgacatccaaataacttctgcttgatcacctactaatttttgaacacgttctttcatttctcttgcagctttatttgtaaaagtaatagccaaaacattgtatggtgagacatctttttcgtctaataaataagcaattctatgtgttaaaacacgtgtcttccctgaaccagcacctgccataattaacaatggtccttctgttgtctttacagcttcactttgctctgtattcatatgatttaataacgcattcatttactagactcctttatttttactgtttttaaagcttttttaatatctttataaataatatcaccgacgataattgtatctgcaatagctgccatctctgtcgcttgttgttctgaggaaataccgccaccataaaaaagttgcgtttctgttagatgttctgagacagcttgaacctttgatacgtcgccataaatgccactatactctatatacataaccggtaatcgatacatatgattgaccatttgggcatatgcttctaaatcttctgttgttaaatctgtatttgctttggtatgttttgccactttgctatcagcattgcacacgacatacccttcaaatattacttcctcaaaatctatactatgtccatatgttttaagcgcttctaataatgtaccattgtgaaatacaacatctgtactgttcagtactgtaggtacaaaataaaaatcaaaaccaggcattacactttcgatgtttgatatttcaagtactaaaggcaatgggtatcttcttactctgctcattaaatgaatgacattatcttcagtaacgtcatcagttccaccaatcataattgcatctgtttgagacatacaaatcgcatctaaatcatcatctgaaatatgtttagctgggtctaatttaaaaatatggcgccattttttaatgtcatacattttccgaaactccttttttaacatacatatgattatagcatttttaagtgtcgagttctaaagacttaatatgaaatttaagttcttttactctgtaaattttttcgtgaaaaaacaatgattatctaccttattagtgcagatagataaccattgtttatcgttcatttattattcatttgtttcaatattcatacgatctaaaatcattgtataagcatcattaccccattgtaatgaacgcttcactctagaaatcgttgcagtcgatgctccagattcttgttcaatcgttgcataggtataaccttgcttaatcattttagcaacttgtaatctttgagacagtgattgaatttcatttacagtacacaaatcatcgaaaaattggtaacattcttctctattttctaacgttagtattgcatcaaacaattcatctaacgctgcacctcgtaatttttcaatttgcatatcgaaacaacccctataattttattctttatgtcattttaacgcattaatctattaaagtgtagcgatttatattttattaaatctgaatcgttactttatttaattttatgctaatccagcgcgttcgaaaatagtgtcaacttgattcaaatgatgtttaggatcgaaacattcatccaattcttcttttgttaaaacacttgtaatagactcatcttgttcgattaattcacggaacggtgttttcgtttcccaagatatcatcgcttttggttgtactttgtcgtatgcttcttcacgaaccatacctttattaattaatgctaataagacacgttgtgagaaaatcagaccaaatgttttatctatgttattacgcatattatcttcaaatacagttaaacggtccacaatatttgtgaaacgattcaatgcataatctagtgctattgtaacatctggtaacataatacgctcagcagaagaatgagaaatatctctttcatgccataatggcacattctcataagctgtagtaatataaccacgaatgactcttgaaatacctgtgatattttcagaaccaattggatttcgtttatgaggcattgcagatgaacctttttggccttttgcaaatgcttcttcaacttctctcgtttcggttttttgaaggttacgtatttcaacggcaaatttttctagtgatgtcgcgattaatgctaatgtcgcaatatagtatgcatgtcgatcgcgttgcaatgtttgcgttgatacaggcgctgtgccaatacctaaatgtttacacacataactttctatttcaggaggaatgttagcaaaagtacctactgcaccactcattttccctacttcaatttcttctcttacttgtttgaaacgttgtaagttacgttgcatttccgtgtaccacaatgccattttgacaccaaatgtagttggttctgcatgcactccatgtgtacgtcccatcatcaatgtatatttataattttttgctttttcagctaaaacgtcgataaatctttctaaatctttttcaataatgtcatttgcttgtttaataacgaaacttaaagctgtatctacaacatcagtagaagttaaaccataatgtacccacttacgttcttcacctagcgtttcagaaacttgtctagtaaaggctacaacatcatggcgcgtttcttgttcaatttcttgtgcacgttcgacatttacctttgcgttttgacgaattttttgtacgtcagctttcggtatatgtcctaattcactccatgcttcacatgctaaaatttccacttctaaccatgcttcatagcgattttgatcagtccaaatattagacatttcttctctagaatagcgttcaatcatttttttaactcctatcgtatgtatactcgaattttcaaaaacagaacattttttaataaaaataaacaaaaagttcgtttttaactctactcttcacagtttaacagaattggttataaatgtataaaaaatttccgtatattctcattctattttattttttacattaatacaattatctatggcagattaatactgatttctaattgtaaatgttcgcaatactttaatctaattggtatttataatgatccattgagaatatatttttgcattttagtttttctcccctcaactacactatccaactttttattacaattaggacaatcaatagctttagtaataccagaatttattcactttacttctcctattgtatggaattttcaacaatctacttttcctagtttcataatatttcttcttacatttcataatatgttttaaaattattcgcttctaatataacaaattttctactcacaaaaagaatatatattctattgcataggtgtggcattttaaatataagacattaatattgaactccagaatcgtataaatacgaaactgattatagaaaaatacgcagagatttttttaatagtaaatttttatagaaagacataaattgactacgcttctttcaaaatcgactaatatattttcatgaaactttcgatcatattaattattgaatgagatgtttgcaatttagtaaataagctactaaattattacataaactgataatgtgtaaaaattaattattttttaaacatagattaaaattttatattgaaactcttaactaaatttaatataattattttataataaaataaaggagtttttatatgaaaagaaactttccaaaattaatagctttaagtttaatattttctttaagtgttacccctattgcaaacgctgagagcaattcaaatatcaaagcaaaagataagaagcatgtgcaagttaatgtcgaggacaagagtgttcctactgacgtacgtaatttagcgcaaaaagactatctttcttatgttacttcacttgataaaatctataataaagagaaagcctcgtatacacttggtgaaccttttaaaatttataaattcaacaaaaagagtgatggtaattattattttccagttttgaacactgaaggtaatatcgattatatagttacaatttcaccaaaaatcactaagtattctagttcatcttctaaatacacaatcaatgtttctccatttttatctaaagtcttaaatcaatataaagatcaacaaattactattttgacaaactcaaaaggttactatgtggttactcaaaatcataaagctaaactagtactaaaaacaccacgtctagaagataaaaagttaaaaaagactgagagtatacctactggcaataatgtaacgcaactaaagcaaaaagcttctgtcactatgccaactagtcaatttaaaagtaataattatacttacaacgagcaatatataaataaacttgagaatttcaagataagagaaactcaaggtaacaatggttggtgtgcaggctatacgatgtctgaattactaaatgcgacttataatactaacaaatatcatgcagaagctgtgatgagatttttacacccaaacttacaaggacaacgattccaatttactggtttaacgccaagagagatgatttattttggacaaactcagggaagaagtccacaacttcttaatagaatgactacatataatgaagttgacaatcttactaaaaataataaaggaattgctgttttaggtagtagagtagaatcaagaaatggtatgcacgcagggcatgccatggcagttgttgggaacgctaaattagataatggacaagaggttataattatatggaatccatgggataatggttttatgactcaagatgctaaaaacaatgttattccagtatccaatggcgaccattatcgatggtattcatctatttatggttattaaaatttgtattttagaaaggtaaataatattatggaacaaattgaattatttagtattgataaattcaaatgtaattcagaggctaagtattatcttaatattattgagggagaatggcatcctcaagatttaaatgatagtcctttaaaatttattctcagtacctcagacgattctgattacatttgcaaatatataaatacagaacacaaacaactcacattatataataaaaataatagctcaattgttattgaaatatttataccaaatgataataaaatactactaacaattatgaacacagaagctttgggaacttctcctagaatgactttcattaagcataagtcataagactatctagatatgattaagtaaactattaatcttattaaaggtctctaggaagaaaaaatttcatgcgatgagattgttttagaaaaagcgacgatatatataatctaacaataatttttaaaatattaagaacccccagcatatgctttatatagcttgctgggggtttctcatacaatatggatcgagcatcttgcatgtataaacaaataggctattcaaagtaaaattactcaaactttgaatagcctttcctcttcaaatagtctttatttaaattggattatgttattggattttcttacctacaaaaacgatttcttgatgtgatacttcaaccgtgccatctttttgctcttgaaacacgggtttttcaatacgttttaccggcatatacccttgcattttcattcgtgacaaacaatcagcaattgtttcattctcatttactttgaatttcatgttctactacactttccagttcttctggttcataatctttaagctttctacgacgaatgcctttagtccagaatccaccatgtatgtttcgaggttcatacgcaatgataaatgctttcggatctaaattttttatcgtatccatcaatttacgttcatattttcttggtgttaaaatttgcatcaccatacgactaccatctctaccaaacgcagcatagtgcgtaacgccatatcctaaatttcgaagttcattcggtaaatctaactcatattctgctgaagttacatttacaactgtataacctaatgccagtttttcttctattttcataccaacaatgatacctattgaaaaaccaaatgcgtaggcaataatattttgaatatggtctaaattagacataaccaaacctaaaccaacgatataaactaatacttctaaaaaactaactgatgcagcaatataacgataacctttcaacgttaaaattgttcgcatcgttaaaaacgttacataacaaacgttaatgataaatatagttagtaccattaaccatggattttctgttacgaatgacataaggcgccccactctctttcaattacactttaaataccaaactgcttcaacctaaccttaatgaatgcatattaatataatatagtacgaaaactctcataaataaatagcgaatttgtcataaataaaaatttattctcaaatgaacatacttactttagttcatacactttcaatttatacactgaagtagtctagctgaatgtggtttaatgttattaattctaactcatatttaatttaagtcacacgttagaagaaaaaattaaattaggattttggccacgtgtatcttgtatatgcaagttcacgtttgtgtgcatttcgtatataatgattttcaattactttttgttcttctggcgtaactggcttaccttctaaataattatcaatcgcctcataagttacacctaatgcatcttcatctggaagctgtggtttatcatcttctaaatcagcagttggcgttttttcatataattcctttggcgcaccaagatacgctaataattgacgaccttgtcgtttattcaaaccaaatataggtgcgatatctgcagcaccatcaccgtacttcgtataaaacccagttatattttcagctgaatgatctgttcctactacaataccttgtcggtttgaagcaattgaaaattgtactttcatacgttcacgcgctttttcatttcctttttggaaatctgtaagaacaataccggcttcttttaatgattgcacactttgatcaactgcaggcttaatattgactgttactatttcatctggttcaatgaatcgcaaagcttgctcaacttcatcagcatctttttgaactccataaggtaatttaactgcaataaacgtacaatcaatgccttcttcacgtaattcgttaacagacatttgtactagttttccaactaatgtagaatcctgtcctcctgaaatacctaacactaaagattttataaatgaatgtgattgtacataattttttataaattgctttaattccataatttcttcagcactatcgatacgctttttcactttcatttcttgtacaataacgtcttgtaatttactcattatcttcttccatctccttaacgtgttccgcaacttcaaaaatacgtttatgtttattatcccaacatgccttgcttaaatcgactggatattcttgtggattcaggaaacgcttattttcatcccaaatagattgtaatcctagtgctaaatattcacgtgattcatcttctgttggcatttgatatactaatttaccattttcataaatattatgatgcaaatcaatggcttcgaaagattttataaatttcattttataagtatgcactggatggaataattttaaaggttgttcatcgtatggattttcattttccaaagtaatataatcgccttctgccttacctgttttcttgtttataatgcgatatacatttttcttacctggcgtcgtaaccttttcagcgttatttgataatttaatacgatcactatatgaaccatcttcattttcaatagctacaagtttatatactgcacctaatgctggttgatcgtatcctgtaatcagctttgtaccaacgccccaagaatctacttttgcaccttgtgctttcaaactcgtaatcgtttcttcatccaaatcattagacgcgataattttagtttcagtaaatcctgcttcatcaagcatacgtcttgcctctttagataaataagcgatatctccagaatctaatcgaatacctacaaagttaattttgtcacctaattcttttgcaacttttattgcatttggcacgccagattttaaagtatggaatgtatctactaggaacacacaatttttatgtctttcagcatattttttgaaggcaacatattcgtctccataagtttggacaaatgcatgtgcatgtgtaccagacacaggtataccaaataatttccccgccctaacattacttgtagaatcaaagcccccgatgtaagcagctctagcgccccacaatgctgcatcaatttcttgcgcacgacgtgtaccaaactccattaatttatcatttgatgcaatttgacgaattctgctagcctttgttgtaattaatgtatggaaatttacaatgtttaataaaattgtttctattaattgcgcttgaatcaatggtgcttctacgcgtaacaatggttcgttaccaaagcataattcgccttcttgcatcgaacggatgctgcctgtgaattttaaatcttttaaatatgataagaaatcatccttgtagccaatagactttaaatattccaaatcagattctgaaaatccaaaatgttctataaaatcaatgacgcgttttaaaccattaaaaacagcatagccactattaaatggcatttttctaaaatacaaatcaaatacagccattttttcatgaatattatcattccaataactttcagccatatttatttgatataagtcattatgtaacattaaactgtcgtcttctaattggtacacttgtatctctccaatcgacctaaatattttcttacattttatcataattcatttttttatatacataagagccccttaatttccatacttttaattaaaatcaaccaacaatttaatgacatatacataatttttaagagtattttaataatgtagactataatataaagcgaggtgttgttaatgttatttaaagaggctcaagctttcatagaaaacatgtataaagagtgtcattatgaaacgcaaattatcaataaacgtttacatgacattgaactagaaataaaagaaactgggacatatacacatacagaagaagaacttatttatggtgctaaaatggcttggcgtaattcaaatcgttgcattggtcgtttattttgggattcgttaaatgtcattgatgcaagagatgttactgacgaagcatcgttcttatcatcaattacttatcatattacacaggctacaaatgaaggtaaattaaagccgtatattactatatatgctccaaaggatggacctaaaattttcaacaatcaattaattcgctatgctggctatgacaattgtggtgatcctgctgaaaaagaagttacacgcttagcaaatcacttaggttggaaaggaaaaggtactaattttgacgtgttaccactgatttaccaattacctaatgagtcagttaaattttacgaatatcctacttcattaattaaagaagtacctattgaacataatcattatccaaaattaagaaaattgaacttaaaatggtatgcagtccctatcatttccaatatggacttaaaaatcggtggcattgtatatccaactgcaccctttaacggttggtatatggtaactgaaattggcgtacgtaactttattgatgattaccgttacaatttactagaaaaagttgcagatgcgtttgaatttgatacacttaaaaataattcatttaataaagatcgagcacttgttgaattgaactatgctgtgtatcattcctttaaaaaagaaggcgtatcaattgtcgatcatttgaccgctgcaaagcaattcgaactattcgaacgtaacgaagcacaacaaggtcgtcaagttaccggaaaatggtcttggctagcaccgccattatctccaacattgacgtcaaattatcatcacggatatgacaatacagtaaaagatccaaactttttctataaaaagaaagaatcaaatgctaaccagtgccctttccatcattaagttagtagaggtgtagcatatgcaattatattatttaggccctaaaggtacattttcatatttggcttgtcgtcagtatttttctgaaaatgaagcaacttttcaaccaaagtcaaatttatttgaagtcatcaaggcagttgcagatgatgacacatcgattggtgttgtccctattgaaaattctatagaaggaacaatcaacattgtggcagatgcacttgcacagcaagatgtctttgcacacggtgaaatacgtttagatattaactttgcattatatggtaatggaacagattccatttctgatattaaaaaagtgtattctattgcaccagcaatcagtcaaacaacaaattacatacatcaacatcaatttgactatgattatgtcgacagtacaattcaaagtttgactaaaattgaaaatggcgttgcagcaattgcacctttaggtagtggcgaagcttatggttttacacctattgatacacatattgaagactatccacataacgtgacacgttttttagttataaaaaatcagcagcaatttgatcaaaatgcgacatcattgatgtttttaattacaccaatgcatgataaacctgggttgttagcaagtgtgcttaatacatttgctttgtttaatattaatttatcctggattgagtctcgtcctttaaaaacacaattaggtatgtatcgatttttcgttcaggctgattctgcaattacaaccgatataaagaaagtcattgctattttagaaaccttagatttcaaagtagaaatgattggtgcttttaattaaactttattttctaggttctacaatttaaataaaataaagagtcaaccaaggattaaaataggaatccatccttggttgactttcttttgtttgtattgtttttacacgatgctgcggtatacgtttcgttaccactcgtccaagcaattgctaatgtaaccttttatttttcgttctaatctgcaattactatttcaatggcagtggttgatttatatcaatacctaaaactataggcattacataatacacgactaaaataataattattgcactgattaagtttacccagaatcctactgatgccatttgtttgatagatattttaccagaaccaaagataattgcattcggtggtgtccctactggtaacatgtatgcacagttagccgccatagctgcaggtgccataagtagtaatggatgcactccaacagcaacagacaacgttgctaaaatcggtaaaatcatcgttgcagttgcagtattagatgtcacttcagttaaaaataagacaaagattgttatgacaattacaataagaatcggactaacaccatttaatgatttcaactgttcgcctaaccattttgctaaaccactttcagaaatacctttcgctaatgctaaaccgccaccaaataaaattaatacaccccaagggagctcttttgcaacttcccagtcaatgatacggcgatgtttttcagtatttttagctggaataataaataataatattgatataaaaatagcaatcgtaccatctgcaacagatgacgtaacttcccattttttcagaagaaactctcttgtaatccataataagctagcaagtacaaagatagtttgtactaccttttcttcatacttcattttgccaagctcgtctaacttttgtttaattaacgtctgaccaccaggtaaatatttcaaatcatgtctaaacgcaacatatcttaaatagagccaagtaatacctaacaaaacaatgaccgttggaatccctacaatcatccatttagcaaaactaatttcatgtccaaaatgttgcatgtattgtccttttaaaataattaatggcggggttccgattaatgtacccaagccaccaatcgtacctgcatagccaattgctaaaactagagatttttcaaacttttgaatacttgtttgattcgtattggcttcttgtaaatcatgtgcttccttaataattgctaaaccaatcggaatcataatcattacagctgcagtgttcgatacaaacatagataagaatcctgttgccaccatgaatccaagtaatatttttgaagtgcttgcaccaatcaaattaataattgtcaacgctactctcgtatgtaaattccatctttccattgcaattgccaaaataaatccacctaaaaacaaaaagataatatcattgccatattcggatgatacttgttctggtgtaagtatatgacctaatggtaataacacaattggtaataagctcgttgctgcaataggaattgcttcagtaatccaccaagtcgcaatccataaagtaatcgctaaaacatagacgcctttccaaggtaagtcttgtggatgaaagaataataatgttaataggaaaagtaatggacctaatattagtccaataagttgtcccgcactaaacggtttctttttctttgattttgaaaagaatgttaaataccttttcgatatcattgattgatgttgattgaaataagccataaatttccccctcatgatgattatgacaagctacttcaactcactatattagagtatagaaagttgtctatcttgtattatcattaccgtcaaaataccccttttatcagataattgggtttattatagcatatttataccgttttatgaatgcgctttcaaaaattatctactattcttaatcctaatgtcatgcgaaactttttacttttttatttcatctacattgattgtagtaacttgaatacccgcttcaacaggacttaaaaacactgtatcaatatcttctaaatgaattgattgagtcgaattattgaatgtattcccaacgattaatacatctttatgtttaacattattataattacgtacatgtatcgcatctttagacattgatcctttaaattcatttccaattatattcatatttatgcctgcttgggaacctaagtcttttcctgtcatcacatctgctgcatttttaccatctctaactcctaaatatctaatgccaccctcacagttaataaacttattattaataatgaaagcatctttatacttcaagggagttaatgcataaccttgtatatcttcaaatatattatttctaatatgaatattctcatagtatcgattatgtctacttgcatgtgagccaatagcacgattccaacttcccatttcgggcaattctgaaggtccaaaataacaatcttcgataatgacatttttcgttatcgtaccatctgtcgttccgaattttggaaaagcaccaggtacttgaatgtctaattgtattgcttcagaataaaagcgttcgccactatagtctatgaatccttcaaatgaacagcttttaatatagagtccgttaatcccacaagcatcaattgcatgaccactcactacattcttaatggtcacacctattaattgaatatcttcagcatgcccaatgcacatagctgtattgttataaggatacgatacaccattcatatcaaacttgccgcctttaatatgaatatgactgtgtccattataaccacgataaaaaccaaagcgacgaccattttttaataaaggaccagaatgacatcggcgtaaaatagtttcattatctaacaaaagtgttgtattgccatatatcgttaatggtttgcaaatatcatacgtccctttcggtatataaactgtcgttggtttacatcttccacgatttaacgcacgttgtattgctcgagtatctttagttttgtttatgcctgttaacccataatctttcatattgatatacataaatcgtcatcctttgtctattttctaattactcatatattaaccaattattcaaattataatcgtgttaggttgatttaacagatagtcataaatctcgtgatgccatctattagcatttttatattcaaaacatcaacacttgatattagttctaagtttgtcacatttagtattctattacagctattttaaaactatcgcaaaaacttcttatattatttgttgattgcgtgatttgctcttccaaaaaagttgattaatctatatacttaatctatatttatatattaaccattagggttaaaaattactctagcatttatgaatagatgggagtttattttattattatataggagagatgttgaatgacacatcgcgcactattagttgttgactattcatatgactttatcgcagacgacggcttactaacatgcggtaaacctggacaaaatattgaagattttattgtttctcgtatcaatgactttaattattatcaagaccatatattctttttaatggatttacattatttacatgacattcatcatcctgaaagtaaattattcccaccacacaatatcgtagatacaagtggtagagaattatacggtaaagtaggtaaattatacgaaacaattaaagcgcaacctaatgtacatttcattgataaaacgcgctatgattcgttctttggtaccccgcttgatagtttattgagagaaagaagtattaatcaagtcgaaatcgttggtgtatgtaccgatatttgcgtgttacatacagcaatttctgcatacaacttaggttataaaatttcagtacctgctgagggagtggcttcatttaatcaaaaagggcatgaatgggcacttgcacatttcaaaaactcattaggtgcagaggtagaacaacacgtttaaatcgtgctaaaataattataaagaatacaatttacaagggagatatttgacaatggctaaaacatatattttcggacataagaatccagacactgatgcaatttcatctgcgattattatggcagaatttgaacaacttcgaggtaattcaggagccaaagcataccgtttaggtgatgtgagtgcagaaactcaattcgcgttagatacatttaatgtacctgctccggaattattaacagatgatttagatggtcaagatgttatcttagttgatcataacgaattccaacaaagttctgatacgattgcctctgctacaattaagcatgtaattgatcatcacagaattgcaaatttcgaaactgctggtcctttatgttatcgtgctgaaccagttggttgtacagctacaattttatacaaaatgtttagagaacgtggctttgaaattaaacctgaaattgccggtttaatgttatcagcaattatctcagatagcttacttttcaaatcaccaacatgtacacaacaagatgttaaagcagctgaagaattaaaagatattgctaaagttgatattcaaaagtacggcttagatatgttaaaagcaggtgcttcaacaactgataaatcagttgaattcttattaaacatggatgctaaatcatttactatgggtgactatgtgactcgtattgcacaagttaatgctgttgaccttgacgaagtgttaaatcgtaaagaagatttagaaaaagaaatgttagctgtaagtgcacaagaaaaatatgacttatttgtacttgttgttactgacatcattaatagtgattctaaaattttagttgtaggtgctgaaaaagataaagttggcgaagcattcaatgttcaattagaagatgacatggccttcttatctggtgtcgtttctcgaaaaaaacaaatcgtacctcaaatcactgaagcattaacaaaataatactatattactgtctaattatagacatgttgtatttaactaacagttcattaaagtagaatttatttcactttcaatgaactgttttttatttacgtttgactaatttacaaccctttttcaatagtagtttttattcctttagctaccctaacccacagattagtgatttctatacaattccccttttgtctttacattttcttaaaatatttgcgatgttgagtataaatttttgttttcttcctacctttttcgttatgattaaagttataaatattattatgtacacgattcatcgctctattttcaactttcaacatatataattcgaaagaccatttaaaattaacggccacaacattcaaatcaattaatcgctttttccaaaataatcatataaggaggttcttttcattatgaatatcattgagcaaaaattttatgacagtaaagcttttttcaatacacaacaaactaaagatattagttttagaaaagagcaattaaagaagttaagcaaagctattaaatcatacgagagcgatattttagaagcactatatacagatttaggaaaaaataaagtcgaagcttatgctactgaaattggcataactttgaaaagtatcaaaattgcccgtaaggaacttaaaaactggactaaaacaaaaaatgtagacacacctttatatttatttccaacaaaaagctatatcaaaaaagaaccttatggaacagttttgatcattgcaccatttaactatccttttcaactagtgttcgaacctttaatcggtgctattgcagcaggtaatacggcaattattaaaccatctgagttgacgcctaatgttgcacgagtgattaaacggttaatcaatgaaacatttgatgcaaattacattgaagttattgagggaggaattgaagaaacgcaaacgttaattcacttaccttttgactatgtcttctttacaggaagtgaaaatgtaggcaaaatcgtttatcaagctgccagcgaaaatttagttcctgtgacattagaaatgggcggtaaatctccagtcatcgttgatgaaacagcgaatattaaagttgctagtgagcgcatttgttttgggaaattcactaatgccggccaaacatgtgttgcaccagattacattttagtacacgaatctgtaaaagatgatttaatcacagccctatcaaaaacgttgcgtgaattttatggtcaaaatatacaacaaagtccagattatggccgcattgtaaaccttaaacattatcatcgtctgacttcattacttaacagtgcacaaatgaatattgtatttggtggtcatagtgatgaggatgaacgttatatagaaccaacattgttagatcacgttacaagtgattcagcaattatgcaagaagaaatttttggtcctatcttaccgattttaacgtatcagtcattggatgaagcaatagcctttattcaccaaagaccaaaacctttgagtttatatttatttagcgaagatgaaaatgctacacaacgtgtaataaacgagctatcatttggcggcggcgctattaatgatacattgatgcacctagcgaatcctaaattaccatttggtggtgttggtgcctcaggtatgggacgctatcatggtaaatattcattcgacacttttacacatgaaaaaagctacattttcaaatctacacgattagaatcaggtgtccatttaccaccatataaaggtaaatttaaatacatcaaagctttctttaaaaattaatttttgagacaaaaataaaccatgcttccataatttgatgttcttgaaaacaataaatttcaaggtatacacaaattttttggaaacatggttttctttttatcatgattaattaaagattaaaatatgacacatacaccttcagatgctacacgagtgttatcacatagcgtaattttacctgtttctttatttctttcgaaaacagttacaactgaatctccttgctcatgagcacaaactaaaaggtcatctgatgaggcaatattaaaatctcttgggaattgaccaccactttcagtaattgttactagttctaagtgttgaccattatcaagaactttaaaaattgcaatgctatcatgccctctattagatacatataagaattgttgatcatgagataaacgcactgctgcaagtttagtatctccatcaaagttttcaggaattgttaaatgacgctcgagctcttcaaatttaccgtcattatattctgcaacactcacagtatttgataattcgtgtacgacataagcaaattttccattatcatgaaattcaatatgtcttgtcccatcactatctttaaataaagattctttataaaattcaaacccgttgtcatcaaatttataagtaacgatacgatcagcacctaaatctgttactgcaacgtacttaccatctggagtttgattaatataatgtgcgtgtggatgatcttgtctttcatgtgtacctgttggaaaatcatgtgcaagttcttgaattagacgtataatttcacctgtgtgcgtatttaattcatacatacgtatgatgccagcaccatataccgcttcaaataaatatcgtttatcttctgaaatcgatacataacaacctgtaccagcttttgaagacaaacatttatttaataaatgcaattcaccattgtcatcaattttcaaacttgcaacaccgcattgttctccttctttgttgattccatataaaacttcattattacgcaccaaatatgtagacgcttctaattcaaatcctgtttctaataaatcaatacgtgactgattttcgtttaattcaaaacgataaatccctttaccattctttttagtgtaagaaccaatatatccatttgtcattacttttacccctccatgttagtcttattttcattttattaaattttagctagaattaacaatcatttatcatttccttaaagctaaaactatttaactactttaaaagaactatttgctgtgatatgtcattattcgattttaattaatccctcttttttacttacacgagcattaattattaacgcgtttatgcttccacaaaatttttgttgcaaaatagaacacatgttcgtataatgtaattatcagattggggtgaattaaggatgacaagttatgaagaagaaactgattatcgtaacgttccaagagaattactagataacaatatacctatgggaagaggcatgattaaatgggctccttttgcaacattacccgaacaattcgaaacgattcaacaatacattatcgaccaaaacaaaattacacgtcctgtattatcagatgatcaattggctgagctaaacattcggctacacgaggcgctacaatatgcccaacctgtagaagttaaattttataataatggctttgtagattcagtacgcttaaccatttatcgtattgatgctattaattatgaaattgatggttatgtttacaatcagcaacaacgtcaaaaaatttctatctttgatatcttagatattgtcttgttaccttaatgctttgaacataattaaacagattgagtatatgcatataagatgatttttaacatcatttttggatgataggatgttgcgccacgatgatgtctgaattcatcgaattcgctatcaggtattgtttcaacaatttcattaacatatcgtgaaatatcattttgagggattctaacagaagtttctattggtagtgtagttggggcatgttataatttttatacataaggcacctcgttaatttagtttagtggtatttattaaattataagaagggacccaacacagaaaattcattttattgaattttacatttatgtgcaagttgggcaaagtgtcttattttttaaaagtatttcaaagtaaaattacatgttaatacgtagtattaatggcgagactcctgagggagcagtgccagtcgaagaccaaggctgagacggcaccctaggaaagcgaagccattcaatacgaagtattgtataaatagagaacagcagtaagatattttctaattgaaaattatcttactgctgttttttagggatttatgtcccagcctctaaatgttattagttatttttactttcaatatcagaaataatttctttagtttttctttcaatatcttcaaaatcttttttaaagatataagcaaatgctactacaccaacaccagcaactaatgttgtaatagcaactaagctaaatacgaatttaaacacacatttaataaaattccacatctcaatttcacctctgttaaattaaatacctatctacatttcattatactatcatatatagaataatcattaaataaatacccactttcacgaaatatattcatcaaattatatagtgagcaagctaatgattattttcaaaaatgccgaggaacctctgtttcaacgtgacatgaccttatatgctaatgttaacaatgactattatcgtgaatgctaacttaagattgatatttatgataagatgattttaagtttttaactcaatatccccaccatctataaaaatatgttttaactgattgataagtcttatacaccgagaaatcacctcaaacaattttatatttcatttagtaaaatataactttatttaacatgacattcaatatacatacgattactatttatttacaatatattacaactaaaaagaaaggggccgatgatatgcaacaagtgacatcagatatcatgacttttagaggttcacatttcgagttaggtgttaaaactggtaaatggcttcaacaaacacctcttctaaaaaatcgagaaaaagaatggaaaaaacgtgtcccacgtttcgatatagatgtaaatgaaacttatcaaatattccaaacatacgcacctcaaatatgggaagaattaatgggactacaaagtatactcaaaatgccaacacgccaaattattttaaactttggacattatcgttttaccgatttaaaagaaagtggttgcacggtctttcaaggcaaagacttcatggttagaaattatgattaccaccctgcaacttatgatggtcgctacttactttatcaacctacagatagcggtttagctcaaattggtcctgtatcaagggtaactggaagaatggatggtatgaatgagtcaggattaactatgggctataactttatgcaccggaagaaaccagcaaatggttttgtatgttatatgattggtcgtctaattcttgaaaattgccgaaatgtaacagaagcaatccaattattgaaagaaataccacacagaagctcatttagctacatactgatggacaaatcattgaaccatgcaattgttgaagtgacaccgagatcaatagatgttcgttatgataatatatgtacaaatcattttgaaatattaacacatgaaaatcgtaattatacaaaagaatctaaagaaagactggcgcgtaccatttcacaaactaatgataatttagatatgactacagcatttaagttattcaataatcctcagtatgaaatttacagtaaactattcaaaagctggtctggcaccatccatacatcaatgtatcaacctgaaacattaactgcatattttacattgggagaaaatgcgccaccagaaataatagatttcaaatcatggttagatggtcaagaccttaatatcactcactttactggcaatatagataccgacttaacttttgccaacaaataaataacaccgatattagagaaattatgcttcctaatatcggtgcttacatcctttatttattcaactttgatattaccatcaatcgtataaaattctaaaacattgtcgcttttcccaactttaccattagtaaatgttttatttttaactacgctatcacccgttcccggatttagctttagtatagtgtcttcaggtttactatcatacttaaaacgaatatctccttgtttagtagaagcttttgcatctacttttgatggcatgtttttaaattcaatgtcaccatgatcgtttaaaaatatggattgtttaatttgactcttgtcgatttgtagcgtaccaataacaactttaatattgctatttttaatgttacttttactaatataagtagaactattatttgtctttgaatctagtgcgtcaagatttgagtttttaataactacttcaccgttaatgctttgaatacttgtgttctctaaatcaacatcactgattctaacacttcctgctccagatgatagatttaaacgtttaatcattttatcaggcatttcaatcgttaacgttttcttattctcatgaaaaggattcatatcaattgcatatcctcttgtcttagaccttttatcactaatcttcaacgtcttatctactatattaattaatatatcattgtcaccatcatatttaactctaaattgattcccccgttttatacgaagttctgtactatccaaatttatagatacattgtcaaaagcatcgtctttgaatgttttatcatattgtttagtaccatatttgtttttatcatagctgaaccaaataatggttgctgctgtaaaaaagacaacaaacactaaaagcccaataaaaaagaatttcttcattttctaacgcttcctttgacagttttaatataccaaagtaaatattttaagattaaacgataaatgtattctaaaatcttaaatatgacaatgataaatactaatcctaatcctgaatatgatatggcaaaaaatacattactaattgagtccacaattcctctggatattgctgatgctaataaaataattggacaaaacagcagcaaaagtgatattaaaaataatgctaatacaaataatccaactatagatactggtataaggatgacaaaaatagatagaatgcctaaacttaatgaagcagcaacagctcttgaaatattttcaaatgttggtttagattcagcataatcaataacacttctagcttttgtttcagctgcaacatcttgtgggtcttttaacttctttaaaatttccccttcatcaacgccattaagttcttgctcataaaaataacgttcatattcatacattttttgatctcttaaatgcctaggtagcgcatcaagtgctgtttctaattcatttaaataagtaatcttgttcatataggtcactcatcccaataaaattattcattcgttttttataactttaagacctaaagctatttactaaaaaattcaatacgtttaatttctaaatcttgataaagtaagtttaattttaaatggttatctctatcaatatactttaccgatgagaaatcattgccaacttttgttcttttatatccgaatccaagattttcaatcgcgttatttatcggcgaaccaattcccccatcaaaattagtatgtatcttttcatctcttactaatattatccccttaacgatgttatccttttctctcactttaacggtaagatcagggtgagctttactgttataaaatttaaaacgatcaaacttaatttttttatttacttcatagccttttttatcaaacttctcatttaatttaatatcgtttatttcaagattagacaaatccacagttttcgtatgacgatattgatataaaccaattaatacaccaaaagaacagattaaaaataatataaacacaacccagcgattttgaatacgcactgatgtcaccctttctttgtacttatttaaatatagcataaggtgcttcccgtttcatccttaacaaaaattaacaaagaatttgcaattaatttatttcattaccttttattactataaattggtataatgttgtaaatgctaaaggaggtttttacaatgacaaatttagaaacttatttcaaaaatagccaacccttaaatgaatacattgatggaatgaagacaaatcaagataccgttctcagtatctatcaatcatttgagttaccagaagatgattcacgcatcaaaaaaataaaagagatgaattattctaaagtattagtaattactgaagactggtgtggagatgcaatgatgaatctcccaattctaaaacacatcagtgaagcattaaatttagaagtacgcgtgttccatagagatgatgatacaaaactgatcgatcaatatttaacaaatggtaaatcacgtgcaattcctatcttcgtattcttgaatgatcaattcgaacaagaaacagtttggggaccaagagcaaatgaagtccaaaaatttgtaactgatgttcgtgctgataaattaccgagcaaagatcatccagactatgcagatttagaaaaagaaacacacttagttatatcaaaccgctataaaactgacgcttcattttggaaagcagtttataattccatcctaaataaattagaaaataaataaatttacaataagacaaactttgaggttgggaaaatttaaaattcccaacctcaaaattatttttattaaatgtcttttttagcgacatataagatattcaaaatgaagaatatcactatagaacctaatgaaattacccattgccaattgctaaaatcaaagttagagctaatcattttatcagttaagtaagcaaaagggatataatcaaaagcatctaaaactttttcaccgtatcttgggataaatgtaataaaaggtttaataaacggtacaatgagtactaaaaatacacctaatgaaaatatcattgctgttttttgtgatgcaagtgtgattaagaataaaaacaagccaaagaatagtaaaaagattaggaagaaccataaattatctacatatttagaaaacgccaaattttttccattactagatgcctgcacaacaatcaaaatcacataatgaattaatgcaaataatattgaaattaaaataattgaaattgttttcgaaataatgtatccaacgcgtgttttaactttactcatatatagttgaattgtaccttgtgaaaaatcacgcgtaattgtcttaacaacaaacattaatccaattattaacaataaccattttgctgcagcaaatacagatccatagacaataatatgtttcgggttatccatcgaatttgccataagtatactttgagttgcaatcaaactagatacgactagtatcgctaaatatgttaaaggacttttaaatatactataaaaatcatacttaactaaatttaaaattctcattatttatcacctctttgatttatattgaagtacgtatcacgcaatgaacttttacgtgtttcaatatatttcggataaatatctaattcagataatgcttttagtataacttgataatttttttgtgcattgatcattaaatgtccgtctgctttgtcgacattttgtaattggaaatgctctgcaagatatttttcagttctatcaaagtctttatgatcaacagtaactatcgttgtgtcagatgcaacaccttcctccatgtttacatcttgaacaaaatgtccgtctcttaaaaatacagctctatcacaaattaattcaatatcttctaacttatgacttgatattagaattctcatatcaagttcatttactaaagacttaattgtagtcagcacatcaattgagccatctggatccataccatttgtaggctcatccaagattaaaaatttaggtttattcattaaagatactgcaattgctaacttttgcttcatccccattgaatatttcttaactttctttttaatataaggtctcataccaaatgcatctataattttgtctgtgtatgctttatcaaaacccttacctaatacttgtgcaaataatttcaagttatacaatcctgatttattatcatataatttaggatgctcaattaaaaaaccgatattatctgcattatcaatatctacttttccatcaaatttaataatattaccattcattactttcataacggttgttttaccaacaccgttttttcctattaatccgacaattctactatcgccaaagtcaaaatcaatatcatttaaaacgacatttgagccgtatttttttgtaatatgttctaatttcatcgactgcctcctttaaattttctagtatttattttattgagctgtttaaaataattaacaataagtataacaatgcttataattagaaaaccaatatttaaaatatatgaatataaatctgggaatgatgattgacttagaacaaaataattcaccaatactattgcaattgaaaataaaaatggaactaaaatgataatagtaaacacgtatataccatatggcactttgactctacgcaattctgtaaattgactaaatgcaattggtatagacaagaagttagatatgacaaatgcatatgcagttgaaaaatagattgaatttggttcaatcacatctgcttcataagcatataaactaataacaagcgttccaattaatgttaaaacaatgcatgtaatatagttggcattaagcaattgtttttttgacactggtaaactcatataaaaataatatgaatcattaccacctaatctacgattgagtctaaataagtgaccagcatctaaaatccaaataatcaatattgttggacttataaaagattgcaataagtaaaagaactttgttgagtcaagcattatataaaaaggatataaggttaataatagaacatagatgataagtgtatatcgtcgtaatttaaaattcctaattaacaatgccttcatttaaaaaccttcttccatcaatttgatgttttcatgatatttaggttttctcttttcaagataaaccattaagttctcaatagaaggtgtagtgatattcactttatgacctaaaatttctttaaatacttgcgcatgttctgttaatcctataaatcccgtacgcttatgttcttcataaataagtagagatgctaattcatcatcaaggtcctcaatagcaccactcacaacttgatatctttgtaacagttgttcttttgaaccatttaagataacttcaccgtcacttaagtgaatgatataatcagctattttttctaaatctgagataatgtgtgtcgacatgaatattgttttattttcatcaattaattcttgctgaattatctccaatagctcatttctagctaagggatcgagacctgaagtaggctcatcaaaaatatacaattcagcatgatgtgaaaatgcaactgctagtgataatttcattttcatcccagtcgaaaatgtttttattgatttattgattggtaaatcgaacttttcaagataaaattcaaatacttgatggtcccatttacgataaaaaggggcaatcattttttcaagttgcttcgtagtccatctctcattaaaataattttcagagtaaacaaacccaattctattctttaactctatcggattgagagccatatcctcttctaatactctaataacaccagtttgtggttgatacaaatccataattaaccttattattgtggttttaccagcgccatttctaccaataaaaccagtgacgaatccttgaggaactttgaaagagatattctttaaattaaactgatcacttgaataattaacattacttaattctatggcattcatgatgattcctcctcataaatgaacgttaaaatatcctgcagttcctcaagtgacatttcgatggcttgcgcttcattaaccaattctttaaccaaattttcaatggtaaaaaattgtttctcttttaaaatagaactatcttgctccttaacaaaggtcccttttcctctaattgttgtaacaaaaccgtctttctctaaatcttcataagcacgtttggtagtaatcaaacttacttgaagatctttggcaagttctctcattgacggcaaatgctctccaggagcaacatgtccctttaaaatattttgttttacttgttgcttaatctgttcataaatcggaaaatcactattgttttttaaaattattttcatcaacgtccccctatcaacttctgtatatatacaatatacacaatatacacagttttgtaaatatgcatgtctcattatcaaccagtcttcagaaataacactgagtattgtattactagcagttgaataaaatgaaatgacactaccatttaatcttgcattgtctacttcaataaaaaagactgctaaaacgaatgtctttaatctctacgtgacaaccgtagcgtcaacataaacaatcgttttaaacagtcaattctatttactatttttacgtcgatcattacttctacttataaaagcacaaatcataaacataatcgctgctaataataattttataccttggctttcatgattagttgcttgtaaataataaccaataataaataaaataattgcaagtactacaaatatttttgttagatgtttcaatttatttcacctcaacatcgacattataacaaatataaatttttttaataagttattgaatttcaaaagttcaaggtactaatcactttcaactaaaatagcgcaacaaaaccattcaatcaaaatgattattgattgcgatatattgtgttcaatgatattatttaagtgtatccacagaattatactacacaaccccaagtctggtaccagcagacttggggttatttatgtgtgtaggatcattttttatttttccatttcagttctaaccaaagtcgaaaaataattagtaagccacctgtaataagtgtcatcatcccttcttgccaccacatcattacactacacctccgttcgactaaagtatcatactgaaggatgacctacacctattctaacataaaaacagaacatatgttcgtattttggcagcagattttacatattattcgttaattcaccaacaacactttatctttggtataattgaagataatatataggcatacaatttttttaaagagaggttaagcaataatgaatcctttagcccaaagcttaaatgaacaacttcaacagtcaaatgcaactgcctttacaatgttatctgacttaggtcaaaatatgttttatccaaaaggcattttatctcaatctgctgaagcaaagagtacaacatataatgcaactataggtatggcgacaaacaaagacggaaaaatgtttgcatcatctttagatgcaatgtttaatgatttaactccagatgaaatattcccttatgcgccaccacaaggcatcgaagaattacgtgatttatggcaacaaaaaatgttgcgtgacaatccagagctatcaatcgacaacatgtcactaccaattgttacgaatgcattaacacatggtttatctttagttggcgatttatttgtaaatcaaggtgacactatcttgttaccagagcataattggggtaattacaaacttgttttcaatacgagaaatggtgcaaaccttcaaacatatcctatctttgataaagacgggcattatactactgattcacttgtagaagctttacaatcatacaataaagataaagtcattatgattttaaattatcctaataatccgacaggttacacacctacgcataaagaagtgactaccatcgtcgatgcaattaaagcattagctgataaaggtacaaaagttatagctgttgtggatgacgcatactatggtttattctatgaagatgtgtatactcaatcattatttactgcattatctaatttaaattcaaatgcaatattacctgttcgtttagatggtgcaacaaaagaatttttcgcatggggattccgtgttgggtttatgacatttggaacgtctgatcaaacaactaaagaagtattagaagccaaagtaaaaggtcttatacgaagtaacatttctagtggacctcttccaacacaaagcgctgttaagcatgtattaaaaaataataaacaattcgataaagaaatcgaacaaaatattcaaacattaaaagaacgctatgaagtcactaaggaagttgtctatgctgatcaatatcattcacattggcaagcctatgactttaactctggatactttatggcaataaaagttcatgatgttgaccctgaagaacttcgtaaacatttaattgaaaaatattcaattggtgttattgcacttaatgcaacagatattcgtattgcgtttagctgtgtagaaaaagaagatatcccacatgtatttgattcaattgctaaagcgattgatgacttaagataattaatttcaaccaataatctgatgagtatgactcggattattggttttttatttttaaaattattccttctttcaaagtatcataagatatattttattcagcaacttgtcaaacactatacctaattagttttatacatctctcctaacaaaatcaaaaaatcggacagatgaaaagtaaaaaactttttctatcagtccgatttattatagaaccaatttatataacttttggcaaatcacttcaaacattcaagcatcacatctctacaaatgtaaaaggcaccccacgattgtgagatgccttattataaaattaaagattagaatttaagttcaatatctacctttttaatgtcagttgctttaaatactctttcatctttatactcagtttttaagtctacatattttgacgaaccatttttaaaatacactttatacactgcgcgttcagcaagtcctatgtcatgtttagttatcccttgatcatttgccattgctgatttaagttttatacttaaatcattaattgtaattttgcttgcattatagaacacaaattcatttgaaactatgttttcaaatttatttattgttactgggaatttcacattattagatttatttatttttttttgatttagtgtattgttttacatcaatatcaatctttttaatatctttggcactaaataaattaggtgtaaagatgtctgattttaaattcactacttgtttctttccatttttgaaatatactgtatattttgcttgtttcgcaaattttaagtcaagatcactgatgcctctttcactttttaatacagatttcactttgtcatttaaatatttgtaactaattaattgtttattcgaaattttaagttttgataaaattggtgttgatgtgccatttactgcaattgtatatggtacatagctatccgctttcgctttagttcctgttttaacatcaatatctatctttttaatatcttgaacataaagcagattcagttggctaatatttgaatttatgttaatcacttttttcgttccatttttaaaatgtactgtgtaagttgctttttttgcatattttaattcacgttccccgatacctctatcatgcttcaatactgatttaacttttttagagatatctttgtagcctacacgtgggtcacctgtaaattttaaatctgataaaattggtgttgatgtgccatttactgcaattgtgtatggtacatatctgtctgctttcgctttagttcctgttttaacagtaatttcaattctcttaacatctttcgcatgaactaagtttgctgtgtaattttttgaattcaactgtaagattcttttaccaccatttttaaaataaacagtataataagctttcttagcatattttaaatcttgttcactaatacctctatcatgcttcagtactgattttatttgactagttaaatttttgtaatttgtccaaggtttatttgaaaatgaaagattcgataaaatgtttgtagatgtaccatttaaattaattgaatatggaacttgatagtttcttttagctttattttcgatatgtttttttgtatctacgttaatattgatacttttaatatcacttgaatttattaaattcgctgtgtaaatacctgatttcaaatcgataactttcttcgttccatttttaaaattaactgtatatttcgcttgcttcgataatcttaaatcaacatcggtaatacctctatttgattctaaaactgatttaactttatcctctaaatctttgtaactaatattttgattcttattaaatgttaagtttgataaaatattttggcttgtaccgttcacagtgattgtgtatggaacttggtaatttgctttatctttctttttatcttcaacttgctttttagtatctacgttaatattaatagctttaatttcacttgtattaattaaatcagctgtgtaaatacctgctttcaaatcgataactttctttgttccatttttaaagtaaacagtatatttcgcttgcttcgatagtcttaaatctatatcactaatacctctgtctgattttaaaactgatttaactctatcctctaaatctttataactaatattttgattcttattaaatgttaagcttgataaaatattttggcttgtaccgttcacagtgattgcatatggaacatggactttagaatatccatggtgtaacgaacttgatgatttatctaatggcttagctgcggcagacgcttcattattattaaagtttgcacctgttgatgctaaaacacctaatgctaaagttgttgtaatcaatgacttaaatttcataaattatctctccttttttgtgtaattcgtatttgcaacttaattatagccagactttctctattttttgaattaactgaatattaataataaattatctttaacaataattttttaacactgttaaaagttcttttaattttgattaactaattaatttacaatacctaaaatgttgtttggttttgtttataccaagcttcaaacttaaatgtcataacaacattcatttcttaattcctattagatttgtcgattatatttacagcatctttatactcaaaaaacatttacttaaaaatataaattcgatttaataattaatttaaatttagttaatcaattttgcatctattttgttgtaagctatataaaaggagtgataatgatggtgaaaaaaacaaaatccaattcactaaaaaaagttgcaacacttgcattagcaaatttattattagttggtgcacttactgacaatagtgccaaagccgaatctaagaaagatgatactgatttgaagttagttagtcataacgtttatatgttatcgaccgttttgtatccaaactggagacttttaacataaaattacttatcattcaaaaagtaaaacagcataatatcaaggtttataactttatcattatcaataataccccatataaaataaaattttagggactttttagggactttaaatttaaaattacaagtttaatagaaacatcaaaataatcacatgtttgtgtggaatgtacaccccaaaagctagactgaaaaatctattttttgaggtgtatttttataggtaaatataataaattagagtagacaactcagaattccaattttataataatattgcttgacatatcaaactagatagtactattttgaatatattattataatcaaaaattcattgtaaacttttagacaaaaggaagtaataaaaacgtgaaatttaaaacaactaaagaatgtaaaagtaataatatctttaaaagaagtcaagaaattaataatagagaaagtgaaaagggttgtttatggggcattagcatgttgattctacttttcttattgattctgtttggaataactgcttgttcatcaagcattcactttattaattagatttttttacttggaggtatcatgtgaagaaccatacaaatataattaatatcttattagttatagtcaactcattaactcattttctaactctaaacacctcattttttaatagttcagcatcggatttctgttttatcataggggctatatttttcttgatcggaatttttgttgcaatatacggtatgaagcgagcaacatattggttaaacttattgattttatttaccaatattttttattttctacacttctgtgttttacttttgttaaaatatataggatttaaattatttatttatgaagggtgtgtattgttatttacctaatttatagtctaattgtctatttcatctgcattataaattttttcataatggctgcaccattcttaatgactaatgctgattatgtatggacgcctatgactacagttacgttatttattttgagtttgattattttcttgatatttataaaaacaaaagatgtcgttcatttaacaattttcatattaaacttacttttttcaatactttattgtttgcctatactgttttatttatgaacacttttatattatctagaaaattaaaaccacccgtaaaagggtggtttttttaatatttactttttagtgcttcgtcaatttcgttataaatcttttgaagttgatattttgcttctgacattttcttaaagtcttttgacttaagagcatacattgcttttagacctgaaatttttatagttcgcttataataagtgtttaaacttccagtagctaattcattaacatttagttcatctaataacgattttaattcattagctaacttttcgttttgatattcattcgatgttggcaagcttgtgctagcttgtgcctcatttttatctagattagttactagtggtgatgctaaaacgattgctaaagttcccgcaagtatagattttctaattttcattttttattctccttagtaattagtactaatttattttaatgactaactaaaaaaaagtacattaattattcattaactatatagatcttcttattaaatgaaaattaataaattatcaaattgacataccttattgtatttatagaaaaacaaaaaaaggtaagcaccgaaatgcttacctacttcccataaacaatataacacatatacattgatttggaaagcgcaaaaataaatttaatatactagcccgaaggggagcaatacataaaaaatgaaaggcgctccttgaaaacgcccaaggtaatattaacataaaatggctactattgcattatctaattttatttaattaaaacaaatatatagcacaaaaaaactagcccgaaggctagcttatgaatagatgaaaatttgaacacattgctgtgtctaagataaatatagcacatattaattactattaatagaaaaattatagcgttttttagatcatttcaatttatcaagaccaaattcatcaaaacactaattgaactttaattttgagttaaaaataattaatcttttattaatttccagttaattaatatatttcatcgattagattaaactcattttaggaatttcgcaaaactaactataaatttaaatatagaatttaaggagaattaacatcattatgaaaaagaaattagcaacaacagttttagcattaagttttttaacggcaggaatcagtacacaccatcattcagcgaaagcttttacttttgaaccgtttcctacaaatgaagaaatagaatcaaataagaaattgttagagaaagaaaaagcttataaagaatcatttaaaaatagtggtcttcctacaacactaggaaaattagatgaacgtttgagaaattatttaaagaaaggcacaaaaaattctgctcaatttgaaaaaatggttattttaactgaaaataaaggttactatacagtatatctgaatacaccacttgctgaagatagaaaaaatgttgagttactaggtaaaatgtataaaacatacttctttaaaaaaggagagtctaaatcatcttatgtaattaatggtcctggaaaaactaatgaatatgcatactaatagtagttacataaattaaaaggtagatatttcttttttatataaaggtttggcagacatttcataacttgccaaacctttatatatctaattatcaaactgcactaaacttaccaaaactgcttattctattacctgccttgtctacctctcctgtcgctatataacgacgttgtccactattagcaatataagtaatccatctatagccattaatgcaatatgcgccgtcatatttgatagttgcgttattgggtaatacacctgtaattcttgaattagttgaatagccatccctcacgttattacctttaacattggcaactgtgtaataaccagtctcttttttatacggtacattgtttttatcgagtgtataacctgctggcactggtgaattcttttcatttttagctggtgttttaacattactgatacctgatacacacttccaataaaaataaccacaccatttaagatgcggtgtagcgactgtaatatttctatgttgttgagatatatgtatcgagtgaagggcaaaaaggatatcaattgcaggataagtgttaggttactaggccacttaacaggctatatagttcactcctactatatacagttaattataacataaaaagcaccccgtaaactattatacgggaatgctaaagtcatatatactacgagggagtagtatgaaaactatgctctctatcataagaaaaaacacccagtgacatgcttgggtgaacaaggatagatgtaaatagttgatgcatgtgtaacacatcataacaaaaaactagcccgaaagctagctataacatacaatctaaaaagacgtcccttgaatacgtctagaaagattataacataaaaaaataggcaagtaccgaagtacctgcctaaaaaaggattatccactttttcatcctaactgatttctccccataagtcacctaatatctgattaggtggggaagaaccattcgtgcatgaatgagaatttgatgaaagataattttcactacacatattcaatcaagacattgctttctataataaacaactattttgttttatttcttttctataataacctttgtaattaagttgaatccagggtttttaatatgctctgataaatctgggacaacaaaacctttttctgttatagggaaagacttcgtttcttcttttttcttattcttatcataataagtgacttcgatctttgcgcttggatctaattcaactactctaaactctttatatgctgtcgcatctaatgcccattcgacatagtattcaattttttcttttgtaagtgtagtcccaggtttaataggaaactcgacataatgaggggatagcaattcatttcctttaccatcaactccagtcacatttaccatcaaatacgggcctgttggttcaaaataactcgcgtcatcgccttttttatattttcctttgtcgaatgaacttgatgcacttacctcattagtaattgaagaaaatgagaataataacaataaaacagttaaaaataataaacttcttttgagcatggcgcttcctccaaatataatatatttgtttttatttatctctttttatagctaacacccttatttaagatgataaatatcaacaacttcattttatatcgaaaaaatattaaaaatcaataaaatattaaaagaaactaaacttacattaaaaaataattaacaaatatttaacattttaacctaagaattaaaacacttctttcacaatcaatctctcatgccatatccactcattatgattgttccaataaatgcgacaccaaccatctataatttcaaacacatatattaatgttccaggcgcgtatacagcctgtccaacatcgaatctatagttagtacgattatcaccgtatctagtggctgaagtagcacctaagccgtcgattttcgcattaaaataagcaccttttgaccatttaaggttataaggcgctttacttccaactgttattttacttgcagatttaccgactgctttttgagcaggtggtttaactttatttgtgatcttattcattaagccctcacttttatacttaggtctaataaagtgagtacagccgtaataattatcccaacgtaactttgcaggcgtatttgcgttaccgtcatagttctgttccaaaattaaaaattggtttgtattaccaccattaaacactaaaccaatatgaccgtattgtttatatattcctttggtaaatacagccacatcacctatttgtggaacaaacgatggtgtgttttcatatactgttgccatgtttttaaaatcgttattgattgcatcttttgcatttccccacattctaatttctaacaaccaataaatgtaatcaactgctaaatctgcacattggtaaccataccaaccgtcaaaatcaatatatctaccttgataccaacgtaaccttgctcttgcttcactgtatgttttcattattttacctcctagtattttcttcttggttcttcatattctaaagcttggtggctatcacctatacctttagtagtcgggtcttgaatcacaccagttaatactaaaaatcctaatatagcgtttaaaccgtctgttaattgctctgtataaacttggatatcatacccaatagcttttgcgatgttttgagcaaataaaaagatagctgacaatatcgctacccaaaatgatttttgtttcattctaattttccaattaatcatattcttatctccttttacccaaaataaaaagacgactaataagccgtctatttgatatttatattatggtgtgttaatttatatatagaaaaagggcaacatgcgcaaacatgttaccctaatgagcccgttaaaaagacggtggctattttagattaaagattaaattaataaccatttaaccatcgaaaccagccaaagttagcgatggttattttttattgcttaattcaataagcttgattactagacctatcaatgcaataaggaataaaccaaactgcaacatggtactaattgtaatcattaggcgtctcctttctaaagatttcagtaatgccaccataggcaccacctccttatactcagatagccaccatctatccaacttgctcacttctgcatattaccataattacaacaataaataaaaagtcagtaccgaagcactgactaaaacttatttacatttaccgaaccaaaaacatgtccagaaactataaccaaagattagtttaaacattttattcacctctcttatatgcccataagcatacgcaataatgctataattagcgacccaaatattgtcccaactaaaccaagcacccacattttcatatcacgtatgttcttatcattttctttcttattcttttcatctatttctctttctttttgaatagcatctaaggttttatctaatttaatgttaacttgctcttgggttttttgacctaatttaatttcgttgagtgtgctgagcattgttttatcattctcttctaaccttctgatgcgccattcatgttcgtgttttttgaaccaccccaattcagtacacccgctttctaaaagaataaagattatgagtatctaactcatagcttttcatactgtttcagtgttaactgttacctctggagataaatctgatctttcaactacttctttaactactttcacacgttgttttttgttagttaattgatataacaaatttaacgtctccgcaattttcttagcgttttcttcagatttaaaatcttgagcatggttaaccatttcagaagttgtaaaacttcctgtgaaatcttgatatactacacgttctgtaccttctttgtcgatttgtactaaaataaacctttctgtattgttgataatttcttttgccataattaaatgacctccttaaatttttgtataaaaatagtgctaaggattactcttcctcagcacattgttgattttctttattttcttgtatatacgcttttaacatcgcgttttcttgtgttaacctcataatttcctgtgataaataatgaattgtatattcaggattagcttgtaatccttgtttgttatcctgcattctttgactcctccaatttcttgattcttagttgttgttctttgataacagggataagatgaatccatagacgatcatacgctataccttcaatttctcctttgtcatcatacgtgacaaactcttttaatcctaaattctccacctcttcagcaatcaaacctacgtatctatcaagtttataggtgtcttccgataattttctatcttctctcagctctctagctaaaatttcagactcagctttatcaaaccacgttctaataggtaagttaagaatagcttttgaatgttccagttgttcatctctatcgttatattgattttcgatagataacttgtatttacgcgctgatgtcgaacgcccaattgtgccagcagaagtaatatgcaaattagctgcggccgaataagtacgtctataaattgagttagaagctatcctatctcctgcatcatctgaacctacagacagtaggtctgtactctgtatatgaatatacctattaccatcacgtcgtttcagcatattaaatttgccataccctgcttcgattgttgtatctccacctgttgcatatcgtccattaacaatttgaacaagacctttatttctttctttagaaaacctgatacccgcaccgtaatcatagttctcatcagaaccaaacataatataaccatcactcgaataagcgttatctgcattagacagcgtgaatgcaaatcggtttaatccaggcactttgtctgtgtttggatataaatacaccggtgcctgtttgcttttgatattcgatgaagcgtaagactccagaacaacccgattattatctgacgttagtgcaacgacaccaccataggaattgattgttatgccattcataccgctatcactgtaagttttatcccaccattgaatagtaccggatgaacctccgtcttcgccttctccatcaatatatgttgaaataccaaaatgtgacatataaagtgaaccgcctgcggtattatttctaaaccttagatgtccatctttaagacgtgtgaatatatcatcggttgatcgtttgcctttccaagttcgttgcacaataccacctagttcaatagaatcattctgtatttgaacatatctgttattgttaccgcctttaattccaattctattaacattgatatcaagaccctctcttgataaattaaggctgttgacaatatcggttttatctactttatctcgcatattttggataagaaggtttatttctctattaccgttaatatcaattttatcagcatttaatctaataccacgtggccccacatttaaagcttgagccactccgttatcatcatatctgattgttgttccatctgtaacgttttggacaatctcgtttaatatatttgaaagtgtacgattggttgcattaaactcttctttagtagttcttaatttgatttccttaccattttgtataatttgagaaccatagcgagtcagtgttctcctctgtgcatctgtgctttctttgaccttgttgtctgtataagcattagctttcttttcagcgtttctagcctttagttctgcgttttgttttgcctcttcaagtttagcttgagcatcttgtatagcgcgttgctcttcttccgaaattttaccatcagcatacgcttgcgattccttctctttaagattatcttgagcatcaatgtatgattttaaagcttcttgcgcttcttgatttgcttgttcaatacttgctttaatctcaggattattggacaaatcacttaactggtcatcagtatattgtttttgttcttccaatccgtttcgatattcgtttaacgtaactttatctttgatttcaccttttaaagtcgttctctcagcttcagcagtatctaaacgttcaacaataccgtctttgtctgttttatagtccgatgtttttacatagtcacgtaattgttcttttgtggattctctagctgcttcaatagctgatttaacaacattaggttctccgactaactgcaaatcttcattcaccgttaaaccaaattttgttgctattatttccaacgcttctttatatttttcatcagtgtattgtgactgtaataatttaaatctatctgaaatagcgattttgacatcttctacatctgtatagacatcttgtaatttctttctatattcaagaaataaagcttgtgtatctaccaaccgaccaatcgttgcagtttcgggtgtcatagattctaaattatttttaatttgattataaacatcaatcacagcgtctaaacttgcttgtaagtccgctttcaaatcattatctactaagtactcgctattcagtaattctgtagcttctgacaaaagactagcgtgttgtatagataaattaataaaaatattgtttaattcactgaatagcgctttctctcttgttataccacctaatttttcaacatcatttggtgttgcttcaatccatcgaccattccaatatctacgcaagacagcaacatcagggttacttgtatcataccaaagcatatcattgactggattttctggcggtgtatcatttttgtgtattttgcgttcaaagtattctaattcaccatctacaacatctttaactatagtgttgatattgctaatattatcgtttaacttttgatgtattatgttcaatcgtttgttaaactcttctcgtaattctgattctttgaactctttaggttgaccgaatgtatatgtgctattttctgaaattatgttatattcttcggcaataacttctgcctctacatacaatggcgggttaaaatctctatgttttactctgactgtatcaccaattgatataatctcgtgcggatacgtaacttccaaatcagtagaagtaatctcatatgacataactgccgacttacgtttatttaactctgttttggctaaagaacgcaaccgtgtttcattcatattttgatcatctgattgaggttcgtatattccccaaatataacgggtaggtaagttgaattgactttgtgcttcgtcatcagtcacaactaactctaaacgctttcctttgtcattttcgggtcccacagcaattaatgctgttttgatttctgacatatcaatcttcctagttaacccaaccaaatctttaccatactcaatttctttacctttgaataagctgtttttctttttgagtaccacatatctacctttgacggtattagaactaagctctatataaaaatccaatgccattttataggttgtacataattgctttaaaacttcatatctagtttgataagaagtccatgacgtagtacgtaagccatcgtattcggtttgttcagaaacttcccaacctgtatcgctcaacacatctttcaatgcttctgaagttgtctttttctcaaatttgcctggtgcatacggtttagctgttgttatatcagcaagataagacgctatacattctatctctgtgtagccgtccatcgtatcttgaacccagttaataataaattcacgccattgtttgtttgaatcccttataataacacgatgtcgttcacggaacttttcagctctttctgatgatatgagcagttcaagcatttctgaattgtcattaacattacgtttatgaatcgctctaactaaggaagggtcatcagtagaaaggaaatctataatcttgtcgttaaaatctaaaacatgtatcacactctcatctcctttctataaatatctatcttgccatttaaccgtcgtatcaaagacgttttcaggttgtatgattaattcactgtacccagaatcaacattgaaataattacttccaaacgatttctcgctcaacattggttcctcattgatgacaacactttttgcttgcatatctattttcactaaatcacctttttgtataatgacatcccttgcgcctttcggtttcggtagaatctccgtattgaatgaacctaatccattcatctccatccacttataaccgttatacttcgcactatagatagctatgatagaagctggacgctgataaaacttaccgccatctatccactctttctcatccatatcaataggtttacgtctatctgggtctttaatgtgatcaaatttccaagttttaatagaaaatttattacctactcttctgagccgcatataaacaacgattctgtccaagttatacattatcggtttattctgatagtcgtatatctttttggggtctcctttttggttatacaacgtaacaacaatatgtcctatttttctatcatgatatttattttcataaccaatagaagcaagtaacttaccatcactatcataaatatgttgtgctgttcttccggcacctttacctttttgttcaacaatacatttataggtaatttgaaaatctgtcatcgctttagggagccctcgtttcgtgccagcaccaacccaaccttttgcatcaggaaaattagttgctttatatccttcgccaagattggatatcacaaagtcaccgccgaccttaccacctaaatcattacttggaatatcttcagtaatcatcttagtccaacctttgaaatcacgaaactcactatgataaacaggaggcatgtaatccttaacttctttggttacctcatcatcaccaaccataaaataatcttcatcatttttagtgatcataaagtaactagatggtttaattgctcgggcttcaacaattaaaggagtgtcagcagtcccactatttacaactgaaacttggtctgaaatcgcggtgtttttgtttccagttaccgagtatttataaggatctgttaacactacttttatagtgaacttcactgaacctcttgggtttttcggtaattttaatggaccatcaaaatatgcaaaccaataccagttttgagatttgaatttaagttttttaggtgttaaatctttaatattgaagaacttgaccaatgcttctaatatatcatcgtgtgttttttctccacctggtgacaatttttcgtttcgaataattaatggtaaatcaaattcgatatcatttaaataacgattcttaacaatagatcccgctctaccttttacgttttctttttcagtaacaaaattaaaagagggtatctcgaaccctctttgcacaaccagccatccaattgttttattgtctatttgaattgtatcttgcattagattatcgtgcctcctcttctaaatctaactcttgtagattcgtgacgctctcgtttatcgatagaattatttacctcatcttcaaacacatacttattaataactggttcgtaatccttatctgcaataacttgattagactcaaccaaactaaccaaacaattaataaccgcatccagtttattctccaatgtatgaatatagtttgtatcactattacttatacttggatttggtaagttgtttggtcgcttatttttagagcggttatcaatatcgttagcagctaaagctaataatttgtgtgcttcgttcgctctacttggatcagtaggtattatccactctggatatccttcttcccctaagtgatacaatccgttatagactttgccaccagtagcatatgcgtaatcaccagcgcgtttgaacgcagctctccatgagcctgttcttggtacccatttacccacaatatatctcatagccgatatagcttgatgagttgggttgagaggattattgtaacccgactttgcgtacgctctaaatgaaggatctatcatttggaacatacctcttgaaggtataccagctcttgcgttgctatcccaattattgactgcattagctgtataattggattcacgactcgcaacacgcatcatctcgttagtaatccaactcgccttataccttcctcctaaaatattttgagcagccttaatagctcgtctagcattagctgcaccattaccaccgggtgtacttttgccgcccccattattctttcttaaccacggtaacgggtctctatgtcttccattccaacgcatctcataatgtaagtgaggtcctgtactaaaccccgtattccccgatataccaacagtctgtccgaccctaacttgttgaccagttttaactttatatttagataaatgtgcataaataacttctaaggcgccctttacaattttcacccattttccataaccaccattatgaacaggcataacttgtgctctaccattaatggttgatggaacaggttcgtaaatgtaatcaaaatccagaccttcatggaatgggcgtccggtttctcgtgtataagcagcagtgtgaccgtataagtaacgtaatttactcatatctaatacaccgccatcacccgactctgcgaaagcatcctcaagccacttgattgcacttttcttaatcttagaccatgcagcttttgttatatcgccagcaatacccatacctttagttagagaactgaaatcaactccaaacgcttgaagtacataatttaaaagtttgcctggattatcgataaagtccatgacatcaccaactttatcgccaagccactttgtgcctttacctatttgatcttttgtccagttaaatgccgatgatgcactagatttaatatctttccacatagtagtaccgaaatgaaatctcggaagcgttccgtttaacattgaataagtttgtgcaccgttgtatacttttgagcctttaggtaaataagcagtagtgtctgtactaggtgtgattacacgtttaccattagggaattcaatcatttcatttctaaaaccatttggaccatttccacgtcctttatccccaactgtagcgaatgtatcacgtgcaatcttaccgttcttaactaatcttgtagtagtatgtgtgtgctctgtaccagtgtgtaacctaggtatttcatccatacctaacttaccaccgacccagtttaagccttcaattaatttattaagtccttttttaatagcatctaccataccgccgatatgatctttaattttaccaatgatagattttaaaccgtcacgcatgtttccgaagatattacgtactttatcccacaaacgaccagctatacctaccgtgttatctttaatagagttccagatgtttgacatccaatttcttaatttagtaaatatatctttcgtcgcattccataaacttgtgaatttagaccttacacccgtaaataacgaatgagccttgccgacggtattgcttttgatattattccacgtactagataaccagtttttcatattagtgaaaatagatttaacactattgtataagaaaccaaaaatacttttcgttgcattccaaattgcagataatgattttgtgaaaatacctttgataacaccccagataccggatattaaacctttaagcaatccaccaaagtatctaacaacacctagaatcttacctacaaaccacagttgtattaaattccaaattaactgcacagtacctttcagtatcattacaatgccgtcccaaacgcctcgccagtttcctgtgaaaagactagagaacactttgataatacccaaaataatattaatagccccttgtattacacctttgatattttcccaagtgctgacaatcaaagctttaaccgccggccaaataaattgcatcacttgccaaatcgcaaacatgattggtttaataataaagttaaaaataaattcaaaggttgctttaatgaaaccagctatattttgcaaagcttgtgttatttctgagccgttctctttccagaaagaggctaattgagcgcctatctctttggcgaaaccaacgattgcatcaactactttaaagaaagttgttctaatcgtattaactacattttgtattcctgctacagtttcgggtggaaatatcttctctagggtaaccgcgcctttactatcacctttgaataaatcaaagaaaccttgtaacgctagtttagctgctttaaatgcgtttgctacaccagagattgcctgatttacaatatttctaaaagtttctgaacgtttataagcttgatagaaagctatgccaataccaactaatgcacctacaattaatgttataggtaacgttaaacttgatatcgacacacctaaaatcggaaatagtttaacaagtgatgcgattttagttcttaaaaacgcgaataaaccaccagctttattaacgtttattaacaagggtcctaaaactgtcattgcattccccatcacgctgataaataaaccgaacataaaaactaaaggacctaaaactgctgcaaataatccaaacccaacaaccgctaattgaattgacgttggtaatttagtaacccatgtcactactttgctaaaagcacttactataatctttagtgctggttctattctgtcataaatcgttaaggctagttcttctaattgcgaccttaaagttcttaatttcccacctaaaccagattccattgtatcggccattcttttagatgcgccggtagatgaatctatagatttggttaacttttgatagtcttcatcagaagcatttataatcgctaatgctcctgacatcgcttctttaccaaatattgtagctgcagaactagcttgttggtcttttgaaagatgtttaaatttttccctcagttggtctaaaagctttcgcataggaatcattttcccattactatctgtaatagatattcctaagcgttccatttcattccccatagctctagttggacttgaaagattggtgaacattgttcgtaacgctgtacctgctttttcacctttgataccagcattactcattaaacctatcgcaatagatgtatcttcaatcgtgtaacctaacgcacctgctacaggagcgacatatttaaaagcttctccgagccctctaacatccgtatttgccttcgagctagtttgtgctaaaatgtccgcaaaatgaccactatcctttgcttttaaaccgaatgccgttagtccatctgtaacaatgtcacttactgcttccagttcttcgccagatgctgccgctaaatccataactccgcttaaaccttccatcatttgcttagaatcccaaccagcaagtgccatgtaatttaatgcttcagccgaatctgatgcactaaattttgttgttgcacccatttcgcgagcctttttcttcaaagcttcaaactcttccccagtagcacctgaagttgctttaacttttctcatactgtcatcgaattcaataccttttttagctgctacagcaaacccagcaaccaccggcgcagttacatacatagtcatgttacggcctacatttttcatactgttaccaatttcttgaagtttaggaccaaaattattaaagttggtaccaagttttcccattgcagtatttaatgctttctgctctctttgcatgtcttttaattcttgtgtggcttgatttaactctcgctcatattggtttaatttagcgtaagcttcattgtatttagcagccgcagcttgtgtctttgcactgttttcaccagtttctttactaagtttgtcataactatctttcagctctttagtaatctgggcttgaactttttgttttttactcaaaccttcgacttttatcttcgacttttctaatgaattatcatatctagaaaattgtgataaattagccgaaagctcacgcgaaaccattttcatttgcctatttaaacctgtcacacctctattgaatccagaaccatctaaatcaacctttatgaccatattacctataggattaggcatttaaaaacctcctttcttccaagatgtaaataaaaaatcaacctttaaaggctgattaaaaaatatctttaaaacttttcgcagttcgctttgtttcaatcttcgattcgacaatgtctaaaaagaagtgtatcggcatgttagccactttttctgcatccatgcctttttctatcaaatctttagctattttcctgtaattgttgtagacagcttcaggtgttaaatcttcttttcttatttctgattctctgtcacgaacttttttgtatcgctaggttccccacctgtaattcgtccaattaactgtccaatcttttcaataccttcttgaccatttggtaatcctttttgaagttctatactggtaaattgattatcaaaagcttcaacgatgaaatccaaaacttcttctaatacttccatttgtacagccatgttgttttcgtattcttcttgcttgtttttgtattcttcctgttctgtcacacttaagttattaaattcttcttctgttagatctttaaaatcagcccccttaaaggctttgttaagtttcaaacctaattttgaaccttgaattgtttcaaacaaagtaataatcggcttcgctaaatacttttgatattgcggctttcctgtttttgtaaatcctgtaattaattcaattgatgtacgttccattattaaattcctactttctttttaatttggccaaaataaaaagagggcgttaagccctcaaaacttacatttctaaattagattgtactgtaatttgcacagtatcagtttgctttcctgcagtcgctgtaacggtcgcattaccttccgccaaacctttaacgaggccagttgatgttacgctagcatacgtttgcccctcagtcactgcataagttactttctgtccagatggttcggttgtggctgatagttgtttagtagcatcaactttaactgtaacttgttcatcagtgacgtttacagaagtgacttcaactttttctgtttttttcatttctttttctacaggttccatattttgttctcctcgactagacatgaattcatcataagttttaccaaatgtttccatgaatacataatcgcgccctgtagtgcttccttttttatcatagccagtaacatgcgagctctcatcaaacaaacgatcaataaaattgccttctacgtcgtcattctggaattcaactttatcttgttttgtttgccctttgatgcttgaacgagtgaatttacctttgaacaagccaacccattctgaagactcatcatgattacgtctttcaaatacaatcgctacatctggcgggatatccttagctccatatttataaccacctacaccttttttagcgccattcaagaacgccttatcgtcagcaggaacagtaacaaatgttgtcttaacacttagtttgccattagatacagcagttgctgcgaccatatcatccccataatcttcctcggtatcttgtggacggtctacttcaatttcttttaagaaacgaatacgtgtgccagctccagtttcccattcattttctgtatcttttaaaataggtgcataataaaagtttgataccccaattgcgatacccgaaactcctgtatctgcaaaatgttgtaagtttaattttaaaaatcttggtgcttgtttcaatttttcaatcatttaattttcctccaatttcattgataaaatcgagccttttgctcttataatatgtctgaatgacatgacgtcactctcgtataacggttctctgtaataacattgaaaatttatcactttgagtaactcaacaattttttctgcttgctcgttcggttcatcttgagaccaccaaacatcaatttggtaatggtattctcttgaaatctcgttatcatcagcgtatgtgtcaggattgaacggtaagggatatatacgaataataggcttgtcagttttttcgtgaaaatggtcatctatagtgtagttaaacacattcacttcatctgtaatgttatttgcaataatagcgtttctaattaatttggtaacattaatcatttttgcaacctcttagcagtatcaagcattgtttttaaaactttgtttttcccttgcttttctgtttttgttataaacaattgtggtttttggtacattgttccaaattctgttgcatgaatacgatgtgagacgcctttagcgtaaccaattgtaacaattttctcacttgtgtgtctgtctgttttcacattagaaacagctatgtgatcgcgagcatgctttttagtattcgcaaaaggtgtattactttttaaaagcgggactaatgacatagccccagctttgacaattacattactatttaaattcatttttaaaactgcatttttcaaaccttgttcgatgttattactttcaattcttgcccccattaaatgaccacctcgccatagatacgcaaataagatttatcttgataatctggctttacatatttgatgttaaatctttgcccttcatgcaagacgtaatgcttatttgttggtttataatcacctcgtgtatctctgataataatagttttaatgaatttgctacctgtattgagattcgtttgagtgtcggattctttagattcttgaatgcaagcgaaacaagagtataatattttcgtcttcggtttcatcggatttccgttcactctctcgcttacatcttcacaaaaatctatacgttcatttaatttattggaattaaatttcatcattttcactctccaaaaattgctcaaatgaacctctcaatttatgcaccgtacttaaaaccatatgtggcgcaagcgataaatccctatccaaataagcaatacggttttcaaaatagtaacttgctaaagggtatatagcacgagcaaatagaggatgacttttaaaccaatcaatatatttacttggtttatccgtaacagcgctagctatttcacggaatgcccaagagtaatatatttctaataagtcgtcctctgaattgtgatctattttgcaatgcttttttaataacttaagttcctcagctgttaattgcattcaatcacctattcttcttttactctttcaagtattactccatgctctttcagctttttgttaacatattcagcacgttttactgtcatttcaacacgtttacctgactttaaatactggcctttttccaagtcagtataagatttcttcacttcatacattgccatagtttatcacctctttataaagtatcgagcgcttattatgcttctaagccaagatcgccttcaccgcgttcactatcatcatattcaatcacaattgctgatttataatctagaattctacagtcttgacgtacagcaatcattaaacattctccgaaatgcatgtagtcagtccatgatgcttggtattgagagcggtcaaataaaacaatcgcatcttttaagttaccgataatcaaagtgttattacctttttgccctagtacttcatcaggtaaaatttcgattttagctcctaataaacgctgttgcgttttttctttaacatctggctggattaaatagtttcctagcttatctttcattttgtctaattttgcaaacatagtttgcgaaacaatcgcaacattatgttcgtaatttggcttaacattcaggttaatagcatctttaatatcatctaaagattttgcttttttaacttctaatttcttgccttctttttcaaaacctgaacttgtagaacccgttgatcctttagtgataacatcaataattgctttgtttcgtgttgctgcaatagttcgcgccatccatagtttcaattcttgcaaaacattcacttttgcatcttcgattgcttcacgtgaaattcggaagtaaccacggtgtgtattaatgtcatatgctaattggaagaatggtttaactgctaattcagggttttcttctaattcttcaactttttcaagggctgcaacttctgattgtcgtactaccggatatttaccagaaccatttgtaacacgtttgaccgtcacatacttatcaagattaaactcaacctcttttaattttaaaatatctgtaacaatttcctctggaataactacaaatcctgagtctgtttttaacgaaccaccttgaatatcattgcgtgtttcaagatattcagtaaaatctctaacttcttgtgatgttacctttgtgttttgaatcgaaatacctaaatcattaatgtttgcttgatttcgataagtacttgcttcgtttacttccactgattgttgattgttttctgaagttccatctttttcttttagcttatctaattcttcttgtttttcttggatttgagaacgtaaatcagtaatttcttgttctaatttttctgctttttctaactcatcgttattaagtgctctcgttgcatacttcacctttaaatcaatttgtcttttaatgtctgaaatctcagattgtaactcttcttttgttttcatttaatttcctcctaaaattggcataaaaaaatagacatcgctatattcagcatgtccaatggctgtatttgataatggtgttcaacttcaccaaatattatttaatatagagtgtttctttagtcttatttctaattcttttttacgttgttcttttttaacggtttcaatactacgtaatgctggtttaacatcagtgtctttgtaagccggataagtcactacagaaacatctgtaagttcacgaattgctgttaaagtacgtttgtaaatgttttcttgttcatcaaaacgcacttcatcgcctttatcgtcaagcataaaaccaaacgaacattgattgatgttgcctacacgcatgttctcatataaatcacgtgcaaatgttgtgtttggtaacttacaacgatatttaagtccaacatcatcagtttcgagctccaaagtacccgattttgtcctaccaattatttgcgatgggatatgatctactaaacaacgcacatcagataaatcagtgttttctaaagcgcgacgtgaaatcgtttctttgaatccaccaagattttcagaccaagtgtcaaactttaacgcatacccctctatgaccatttcgttgttatcatttgagcgtacctcaataatgttgccaactctcgtttccttactcattttcctcaccacctttcaattttttatcagtagctctcgatttattcatctgatactcatctacaagttcaatatttacatggtttaaatcgactctgtgaatgctaccattaccgcctggtattggcgctaatccatcacgttgtctaatttcatcgatattcatctttccagaatcaatgttaattttgtcaatttcagcttgtgttttttcatcaacaactcgtatttcagtggtatcaaatttaaattcacgattcacatattcatcattaaacttaaaattcaattctgcacaaacgcatgtaatataaggttttaaagttgataagtaatctaaattagcatccgtgatactcatgttcgctgtttctatgccgaacttatgcaatggaataccaaatacacctgctatttctcttgttgatgatttgttttctctgataagctttaaaacttctgtatcaacttctaattgatcaaacgtcattgattcatcgagtacgacaactttcccagcttgtttagttccactaaaacttttgtgaaattcttctctggcacggtctcttgcttttttattatctaatacacctttcattttcaaaataccaccagcatgtgtgccatttcgcaagaaattattaaggaaatcttttccattgttatctgattctatcgtgcgacttaatgtgtctaacagtgacaaaccatttataccatccaacgaataaaatttgatgtctagcatatcctcaaacttaacattacgttctatattatttccgttactgtctatcctttgatgaaaataatacagtcgacctcttgcgtctgatttcaattctatttcggatgtctttctgaacgttaaattcataggttctcctgttttatcacgtgtaatttcaatatagccgtgcgatgttagtaaggcactaacaaacactactaatttgaatatatagccgttatacattgggttaggacgtgtatttaacaaattaacaatcctgtcactataattaatttggccgttcactgtcaccctaattggcatgcgcgccaaatcagaagcaatcatcataactgccgtaaagatgtcgctatgcctaattgcttctatatctttatattgtcgtaattttgttccttgaaaacctggcaaagtttgaaccatcatttgcaaatcatcttcgttgtattgcaagtctcgtttttcatttttataaaaaatccccacaactactaactcctttcttgattgctttcgtgatttaaaatcaacgaaataacaatcagtgttataccaatgcataaaagtcctatattttgaccgaatgctttatacacagaaacattaaccacaaacaaacctaataaaaaaaggatgctaaccaaattagcaaccaagaaattaaaaaagacatttattttattcaagtccattttgtcaccacctttaaaatccgaattcttcgctttcatatttctccgtccaattttcttggaattcgtgcattctagcttcagtgaaagctgtgataatcgaaataatcggatctattttttgacgattcatttttttatttattttcacattgtcttctccgtcacgaatcaaaacggcattattaactgatgttgtaagtaacatattatcgttatgctgtattctttcatctgcaacccacattctaaattctttaatagattgtgataacgccttaaaactttgtcccacttcaatgagtggccaatctaaagccattgattcgattgttgttataaaactttgcgcattccaagggtcatagcaaacagcctgtacattcaggtcatgcgtcgttataaatttcactataaaatcgataacttgtttataatcaatcatgccgctatctgattgtgtagtctcagcttcgccacgttcaatcgctaattcataatttattttgtctctcttagatttttgttctaagtttgttcttaatccaatgaaagaatgactatgtaaaaacacttttttatcgtcgttagggaaaataaaccctacagatgttaagtcatccaatctcgataagtcgacacctatatacacatctttaccattgatattaggcataggcgttattacttgttcccaatctgaaatatctagcaagctatcttctctttgcgcttgccataaattgaagtttttaatcaaaatcttatgatatgatgtccctttttctaattcgtcttgtatatcagcttttacattttgaagtatagtttttctatgttcttttgattctaaaagcggcattgctttaatccactttgtttcatcttgaacttcttcttgtgaatccatttcagcacaatatacaaagtaattatcagctcttacttcttcatttaaaatacgtttaatatacttatactcttggtacatttgactatttaaattgtctccggccgttgaaacaagtagggttaaaggatttttttgtaatgtcatacctgttttaaaccttgagtacatctcatcatcaggcatacttgccaattcgtccaaaatagcaactgtaggatctttaccatcaaccgcatctgggttattggaaagaggtgcaaacactgaactacttaatacatcttcaatgtctgtctttcttacgtctgttttttcacggataaacttgcttttacttcgcattaggtttacttgttggcttgccatcttgaatattgtttgcgcttgcttataagtagatgaagctacataaatttgtctattaaatttagggtattgtccaaacaacagttcgttaacggacattcccgatacgattagagacttaccttgttttctagccatacttatataagctttagtaaacattctgtattgacctctacgccagccgtataagctcccaacaatgaatttctgaaactccataagaggcatgggctggtttgttttagggtctggaagcatttccacaaatttaattgctttgttagacaaatgattatcccaatggcaaccattcggcgggttctccataaaagataggtgacgtttacatacttgaatattcttcaaacttgccaaaatttctcctgaaactaccttttttgcgtatttagtaacataatcagtcattactaatcactcacaaattccatatatggatcatcatcttctttttcatcaggaaccataatacgcaatcggctatcaatagttaatcctaaagtattagctgtttgttgcaatcgaatacccgctttttcctttatgttgaacgccggattaaccttttgatttcctttgtcgtcttctaaaatcaagtcttcgcgctctaaaatcaaacttgctttaacaaagtcactataaaaactacaatattgtgctaattgtgctttatctaagttggaaattggcaattcttgcatgtgcggtaatattcttaagtattcttgtttcgctatttcatctaaaaagtgcggtggttcagtatcgattttagaaaatttatttaattgagcttcttgacgctctttttcaataatttcttcttttgtataattcttgttcgaatttgacaaaagcttcttaggtctacccgccataaattagcacctcctactaaaaaaacttaaataaagggaattttttgagaagaaaactctgctccgttctccagaacctttcattgacgcccgtttcatctttggggtgacttcctatttttatcttttttaatatttcttcaaatcttcttttgtcttttggttatggcaagcatcacacaaaggctgtaaattacttttgtctaatcttcttgcccaatcaatttttgttggtacaatatggtcaaccatagtcgcttgattgccacaagaaacacaaataaaatcatgttctaacaatacaattcgacgcatgttttgccacgttttcgatttataaaatcttaaatactctggatcgtttcgacgtctcaaatcattgtaattttcatttgcatattgcttgtgtttatcacaataactttcattatgattaatcaatacattacatgttggatgaccacatcgcttcataatagacaatgcacatcactccttgtcgactttcttaacatcttgcacagttacttgtctatcatctttatcattgctaattaacaataagtttcctatcgatccatcaacaagatacttactaccttgaaacaatactttgtctcctcgttttataccattgtctaaattgatagtctgattaggtttattcatcaagatagtgttaacactatgaccagctatctcatccaagttaatacctaacacgttagtaagattagctatattccacaatgcttcgctaagttcatttatcataattcctttatctatcggtacattacaaaacatatgctgtttaattagatctgtaacattgcctgtagattgagttaaacctaagccgtaacaagtaatatattcatttaaattcaattcatcattgtgtgtacgtgtagctatctcttggtactttgatatctccattctccacctcttgtttataaaaataaaaaccctcacttaatgtgagagttcaaaagaaatataaatgttttgctacacagcaattataataaaaaacaatatgtagcatcaaaattagtccgaactgtacgatgtgtccgaactgtacgatgtgtccgaactgtacgatgtgtccgaactgtcggtttcttgttgcaagttataaagtatatttactatatcttttactctagaataaaaattgtctctgcctatatcaagaatgctcatgatcctattatggctttctcgttgttttaacatttgtaaaatatgataatctttttcattcgtgatgtattcttcatattcatcaatgaacgctatcttcttaatcaagtaatcgtactttctaagcgctttgtttttgtttataactttcactaacactttattgctagtcgtgcctttagcttttggcatcgcagattgataaccatattgtgcaattgatgtactttcgttatcgtagactttactgtctattatgttcttcatccacttgtagttatctatcatttcacgtatttctttcctgttatacatgcaatacctccgataatataaattactttttaatatcgttatttattcgcttcaattcaatcctgtattcttctaacccgttgtatcctttagttttaactacttcatcaagtagataatcattcatatatctgagtgcttgtatctctcttgcacgatcactattaatactgatacaaactaatagcaatatagcaaatacaatagtcatagtaatccacatcactcacttacctccgctcgaaagacgtaatcactcggcgcctctacatcatcattagctgtcatcataatatatacttgctcagttacatacttacctagctcatacatcgctagtaagaataataatcttaatatttgcttaatcatttcccacactcccttatattttcaaacaactgacctaatttaataactgcatcccttttaacttgtgcctcgtacttctctttcgcttcttctttactctccgcctcaacaactgtaaacgtctgattatctctagcagcagtaaaatgttcatgtggtagtcctgatgaatctttgaatgttgtgactaagtattgtgtcacttctcatcactcctatttatttgatttcaaaatcaacttctattggaataacaacgattttataaccttcgtacaatcttttgagttcatcaaatatttggcgcaaaccaataacattcatatttttaccctgtaaaataaatatctccttgttccaaccacgatatataattttagtgcgttctctcacttccccaaaacctccttaactcgatctaagatgtctttacacgtatccttttcctgcgtctgctgttccatcttgtctttcgtggttccttttcattttctttttgtatgcgtcaatgagttggtcgatagaatataagttgtaagctatgtctatcactattacaattgccaattggtcgggataaaattctttgaatattatctgtggtgtactaacaactgcgtcttgagcaaattctttatctttaaaattaaacattttgtgaaattctgtatttttaaaacttgattcaatcgcttcttttatctcttctgatgacactcctacttgattcgcaatactcaacccaaacgccaacatgtcagctaattcatcaagttgtacgtctaacggcttacctggtttcttcttccagttcttaaacgtttccaatgtattaaaccattcaaagaattcaactacatatgcaatcttgctatctcgtaagttcagcgtcggtattctatcgtcgaactctttttgtatttgtaataactcttgtaattgatcaattgttaatgtgttattcattttcctgttccacctctacattaatttcaaattcatcacaatcaaatggcacttccattctcgcaatatcatgagcctcaaattctgcttcttctaaactttcagcctcgatagcctcttcaatcatgcctgtatatgtgatttgaacattaaattttttcattctccagttcctccttgtattcatagataacttgacttaccataatccctattgcttcatcaagttcaataccttctttaactgaatgttgaatagcatttgtcattccctcaagtatttcatcaaacgcttgcgctttcttatatacgtcctcaatctcttttagtaatccctctgtgtcattgccgttatacgcactagcacttataacggattgttctatttgttcacggttattcatttgtgtcttcctccatttgccctaaaaattcgtagaactcatttgttccgtctagttcttccattcgcgacattataatatctgcagtgcttttacctcctatatagagagctcctatcctgttcgctttgctctcagggtgtagttctctaaatttaaaacagtaatgttcgtatcttccaagcaattcatttttaagagtgcgccacatgttctccaactctttgttacgttctcttaacttacctatatccacgataagctcatcttgttgcttcttgtactcatcacgttcttttaatgctttgtgaaatttacctaataacttgtttaatttagtacaaaggtttttatattgttcatctgataaggtgaccgtcatctcataacctccaatagctcctcattttcaaaaatatttccaataatttcaataatatcgtcattttcacttattaattcagttacattgctaaaagttatataaaaggctccttctttaaactcgataaaacttacttctccggaataagaatcttgaacaatatccccctcataaatctccacaccgtgcacatctttaaatcctgtgtattgtaatagttttacttcattgaaacttttataacctgttgaaatcaaaatgtacccactattaaaatcgatttcgtcaataaaactcataacttttttatctttatcccacgctctaaatttcggcatcatactactacctccactttttcgacctctatgcttgcagttttgattttcattatttccatctccttaaaataaagttagttgcttctgttcctcgtattccaaaccatgttgctttatatatgtttcgagctcttcggttgtatcaaatgtctttttcacgccttgccagcctggtacgatatgcccgtgaaagtaataagtgccattcactacatggatatgtgccactcgttcgttatcctgatacaaatatctcttagagccgaaaaattggtttaagtattctttacatgcgctatcggttttaggcatttatacttcctgccacttcttgaacatttggttataagtattatcaaaccagtacggatcacgtgaatgtttctgaggtacattaaacaagtgtggcttctttcttcttagctcagcctctctctttcgctttctttccaatttgcgttcgagtctagcttgttccagtctttctattgttttcttttctctgtactcgcttaaacgcgtaccttctggtgcgtccattgcttcatgtagttcccaaccgtcttttactctcttagaaaccattccagcggttataccgtgactttctattaattccatttcaaatttactgaacctataaggtttatcgtgtatccttacaattcttgctgctttcgccatttattccacctctatatatgcatgtcttattgttatgttgtcatactttagtaattcatccggattgtcatctaagcgctttgctagcatatctttttcatcatccacatcatcgaaatgatgatattcaacttctgtaggtattcttatatcaatcgttgcatttatatatgcttgttgttgcattaaatcacttcatttctctttttcttttacgtctgactttcactaagtcctcatataccatccattcttgacctgtgtatttaggcgctttacatatccacgttaaattcacatctctatactgatatctgaatatcttcgctttgatgttggcaacttcagtcgccttacctttaacgtctataacttcaaccagtttcccttccttccacaaagagaaatcggctatatacgtaatcggtctttgcttcccaaatttaggttgtagttcgaatttaggttgtagttcgatacgatcatagttagtgccattcatattactttctaaatattggtaatattcgcactctactttgctatcaaatacaattcctttgtactcaactttcttagcgttgtatttactcattgtgccacctctaaatatcaaatatcgttgcttgtaatcctagctcttgctcatatagaagcccgtgagcgcctttgaatcgttttaggtctctatcagtcatgattttcttttcgtcgctgaaatgggctcctgtgagagaataaacttcatttacgttgtctttatacttgatgaccttaatatcttccgtgccatcttctcggtataagtaatatttttctttcggcatttttaacactccttaatattcgacgacagcggggcgtgtgtgacgttctgcaagtttttggataaataggtcatataacttattttcatcgccctgtgcctcgtctatgagtttctgagcgtacatatctgaacactcaagtttaattttcaaaaattctttggttaccatgcgtctcgctccctgaaatcgtctccgattactcttacttttcttgcattgtgtttcattcttgaattgatacgttgccagttcatattttgatttagttctttatcactaaagttagttgtaaagatgttgtttttacctactctgttatcaacaatgctgaaaagtttgtttaaagtatgttctgtgttctctacacccatatcatctagtacaagtaaatcaatatcgcttaacaatctgactaactcgtctgtagtctctactgcatttttgttgtatgtcgctttgatacgatccatcaacattggtatgtgcataaaagcaaccgtatgccctttagctttgactgcttttgcgatagcgtatgctaggtggcttttaccagttccgtatgaaccttgcaatattaatgattttggttcttttgtagagaagccttgtacgtactctattgctgtttgtttagcgtgtacttgtttttcattttgtggcttgtagtttttgactgttgcatctcttaaagacggattaacgtttgattgattgaatatgttgtttatcttccgttgcttgtttcgcttatattcctcatagatttcacatttgcaaccgtctttatactcgtaaccattcgggtgttttttagtaggagcaaacttatataagtcgtattcacttccacatctctcacatttcaatcctttttcgacatgagtaggttgatattttttcaagctttcgtttatcttttcgctgaatagtggtttcataatatccccctaatcccaataactttcgtcgtacttcatgcgttccaattgatccgtgccagttggttgtattttttgattgaggtacccctcaaatttactgccaaaaagtgtttctggtctaaggtatttatcgctatccgtgtttaaccattcagctgttttgatatcaatcacctttttaaaatcctccaacctaaaatcttgattccatcttgctttaataaaatcttttgttttagctgtattatgtttaaaatgctttcctgcttttttatttaagtattcgataatttctttatagggaatggaagacaccgtcgggttgcccgacaatatacttccttcattattagtattgttattattagttaaatcattattagtactattattattagtagtatgcgatttaccattaacggtttttccattgttggttttaccgttaacggtttttccaacgttggaaaatcgaatgtggtgcggttgctcatatactaagtactcataaccatttaacctaccacttttatcacgttttctactacgttgaatgtatccaatttcttccagttccttgattccactctttaaaccgctaagtccatcagttgaatgttgctctagttctgtttcgtaaatttgccagttatcaggtcgacttaacaaataaagtagaatacctttagccttccaacttatattagaatcatgtataaaatctttgtgtactgtgacaaagttacctgattctttgtaaactctaaatgttgccatttcgttatctcctttctggtataattttgttatcgctactgcgttagattgggggtgaataaaatatggaaaaaccttatatgttaacatatgatttaaactcacccggacaaaaatatgaggaattgagaaatgttataaaaaaggaaatttctaatggtcattgcaattattggaaatcttcatttttattccgttcttctttatcaacttcagaaatgatagaaaagttgaaaccttatctcgattctggagataagctgtttgttacagaaatagtcaataacaaacaagggtggttaacaaaagaacaatgggattttatcaaccataatatttttatttaggttcttttattgaatcttttgttatatcaggaaaacctttagaatcctcaggggtaaattttttaatttttttagcgcttctaatctcttccgccaagatgacgattaggagtgctatttttattattcttagtctattcattcctttttctctcctttcagcattttattgagcctctcatcaacttttatccacgagtcatgcaagtgatatttatcatcaaacgacttaacgccaatcgcatgttgctggttatggtgttcgcgacataacgctaatacatgtttgttgtagtgattcattttgtttctgttcattcctctgccgactgcttcataatgcgctaggtctgcgtgaggctttccacaaattacacagttgcggttgattgtagcccaatacaatagtgctttatcttcacttaacaacttgcttgtttctatgctcataggtatttgatgatgaaacataaacgctataatcagttctattaactcccttgcaactttcatagaacagtcgcgcagactgatttcttcataacctttcataatttccaattctgtttgtaataattttctaattgattccaccggttctccccagtgaagttctatatctctacacattgcgaatatttttttgcgttgttctatagatagttttttattatccggaacctctacttctgcttttagtggatatccgttttctagtaagtcaatgtgactttgttcaagttcaacaccagtagcaacgacggaataagtgccgtcattgtctttctggtatcttgtaatgtattgcatttaaaccacaccttaaaacgctaaatcttggtcgtcatatccaaattggccactgctttcaaatggattgctttgttgagacattgatgtttgttgttgtgccccgttattttcttcagctttttgcttatctgtcttcggaataggtttgttaacaacatcatcgccctttttgtaaggtttaataaatgaaaaatccgtaaaatacttaccttcatcttcattgaatttccatttcaataccaagtgacaaaacttaccaataagatcattggtatcaaaatctaagctaggaagatttaacttaatacctaatcgagtaactaattcaatcaattgtttttcttggaaatcatatttatacggcggtacaaattgattatgtttatattgtttgccttcatcattttcaaatacgattgtgaaatatctattttctctatcattgaattcaatatttttaactttcactgtgaattctccagcttgaaaccctgctgagccgttataaaacttttcttgatttgtttctttagtaaattgcgcttgtcctgtgattttcataattaaataccgtcctttttagtttttttattagtttccatttctgattgcttgtactacgtcgttaatacttggattaatgaaacgtttgttgttaattttaatgttgcttgagtgtcttatctttgtctcgaataagtttgatggttcagcgttaagaacatattgataagctttttcgccgtcttgctcatgttcttctattgtcattcttgctaacacatcagattgactgatgaccgctttttttatttgatcttgtgcctctatcgtgattgttggattgatagtgctaccctcatcatctttgtctttgttaattccctcgtgtccacttatagcaagatggaattgataatgttcttgtaatttagaaatataacgataaatacttacaatgcgtgtagcacactcgccccaatcattaaatgttggtttctttaattttccgtccatgatgtcgtccatagtgatatcacgtagcttttggattgtttcaatcactacaacatcaatttgttttccgttttctctgagttgttcaataattttaggtaacatcttaatcactgcactaaaatgcttgtaattcttaatctgcacaactgccccatcttctgttaccgttgttccgtcctcatttatatctagtactaaggcgttgttatcttttgttaaaaacgtagttttaccagtcccgaacttgccgtatatcgcaaatttataaaacttgtttgcattttgtttgctgatgtcttttacacctagttgcgttaagatatcgacatcttgattagttttttcagtcatgttctaccttctcgtactcaattgtttctgtcactgttttcttaatagctttgtgcttagacatatcaataacggttttgtctagtccgtcgaattctcttgcgtctcgcatatcagttgaatacttcactgtgtcgttcacttcagttggtcggtttgtaataaatagattttcatctttatgcttgattagataagttacagtctgcttcatagcaacctcctaccatctcatgactaagttaattagcctgtctctttcgtctgtgttctcttcaatccattcataaatagattgatttaatatgtctaatgctgtgtatagatcattctcatctgttatatttataccgtcgataaatctatcttctaaatctaagacattcactagaatgctgtaatcttgtttcttaactgctaatttaaaatcgaatccgtctacattaattactttttgacatacatcgccaattttgtagtacattgttgacacttcctttatttcgttttatattgaatatgcattaattttctaattgtttagactgttactcattgccgtgagtaacagtttttttattcttcataaaagtattccttataaaatatgaatgttgcgatacttgcgaatcccgcaatcgaccatgcagtagtgaagtatagaaacggcataagtacaattgctaagactgtaaagcacagtactgctactaggtagcttttataaatgttgctcattttattctctccttatatatttcattgaaatgctcatcgacgaatttattcatctttcttgcgttaaatctccagcgattaaaattctcatctgggtaatgcacaattccttgcgctcttagttctttttcaaatctaggatgaaatagtaatctgtccttgatagtctcatcagatgcaatttttaatttcttctttaagtcactcatgttccatacagggtctaatgaataaccaattagctcatcatattcatcttttgtgataagtacatgtgtttcaggtattggaactgttacgtttaaaatatgtggcatttctatctttcctttcgtgtataatgttgttatctcctagtgaaaggaggtgatattggtgtatattgatcctttaaaaaatgttcgtttttctattaataacgtaattagtaatgttgaaatttctaaaagtatggcaattaaacaatctttaaaacctaagtaccaattagatataattaatagaaacaacataaatttattttctgacttcaaagtagactttcatctaaacaacttaattgaaatgaattttaatttgcgtaattctttttcatctctaacatttcaaagaaatttattttctgaagaaacgataaaatcttttaaggaactctataggtttgatgatgagattgtacttcaagcacaacagaccattagagatttttatatcaatccaactgctatctctactttggctgaagccatcaattcgacctatccaataaatgagcaaagtacctacaagagacacgatgaatttgtcaaacgtatcgaaaatgattttccacatcctttcaaaaagttaataagatggtctaatggcattgcagcaggtgctgacattcaaatctttgtaacaaactatataaacgagaacgatttacatattcaaaattcattgatagttgctatagtttgtttattaagttttttatcgacctattgttcacattctaaaaagtaataataaggcctaatttagttaaccttctttaacaactctgcaactgctcgcaacaattcagggttgttacttctttctaaacagtaactagcatgctttagtaatttgagttttaatttatttttttctttcgcgattctaaatttttgtaacatttgttatgcctcctttgcatttccaaaaatttaatctaacttaaattcttttccatctattaatccataaaagttattttttaaatgcggatgtctttcaagcgtcatttcaataaaacgcgggtctatcattaagtcgtagccatcgttgtattgaatattaacgggtcgtctattaccggcttcgtcatagtagtaataaatgacttttttgttttgagcttgcattgttcgttcctcctattaagatgtttgtttttctcctaaaaacttattaacaaagtattgttgtcctttgcctgttacttttggcgtcttactaattgatgtatgaccgtccgaatgtgtgattgatgtttctttaatttcgaataactcacgttccattgaatactgtgtaggcatgttataatccacacccttgcgtttaataaggaatccgttttgacgtaaccactcaaacaatctgcgttgcccgatgtttataccgttttgtttaatgatctttgctaactctccaactaaaattgatgtcttagtagtagctactgcatctgcaaatacaatttttggtttatcacgttcaatctttgtttctaattgattgattgtgttgttagcaatttttaaagcacgttacataatcatttctggactgttccatgctttctctacttggatgaaatactctctaaaatcaaaacctttttctgtacctgacatcatcgcaacatgtttagctacatcaagtgttaaagcataatcttctagttgtcttacagctccgttattaacaaccgtacttgtaagtacacttgtaaaatccctattttctttgaaatgcttcaagttaatttctgcccaagcgctaaaacgctttttaacttccaaagctttatataactctcttgcacttattgcgatttctccattttctttttcttgtatgttgaacatttcgccgatgttcgattttgtttttaatgcttgcatattgtttatgctcctttcgtgtataatgttgttatcaacctaaggaggtgataagtatggacataatcgcgatttgtatcgcaatttttagtttcttactgactgcacttaaatattatttagactatatgaaagattctattaacatcgatgttatacctaccagaagctttaattacttggtcgatgacaaatcaagttacaacgatataacatttattaatttcacaaagtttcccatttctgttattgacgttgaatttgatattaaaaataaagtaaatgaacaaaaaacgttcaaacctatacgatataaagataaaaactactccattccatttactttaggaccttatgaaagtgtagaatgtacttttttgctcgaagaatatccagtgatatgggaatgggatgtgactatcaaagtcactaccaacaaaggaatctatataaagcctgttatcatagaatcgcggacagaacaccgagaatcagagccacaagtgacagagttaacatcagcaaataaggtaagtgctctttccaaccccaaggatggttttttaaagaagtttttatatcatttaaaaccttaaacatttaaaatcctccctttccgtcactctttaattggagtggcgttgattttttcgtctaactttttcaatgctaatttgtaaataactgaagcatgttcggttttaaaatgagattcagcaataattttcaatgtttctaatttatttcttgcatcaccgtatgtggtactttctgatagaacaccttctaaaatttgttgaactcgataatctaaaagttttaagtctttattgatgcattgttcgacacactcttctttggttaacgtgatttgttccattgtgcccctccttaagttcatataacatgaactttttctttaaaaaaatataagtgtattttctctaccggtatatctagtagttgtatagctttccatatttcactgtctttccaaccaactttaccgttgagttttaaggataaacttctctctgacaatttcatagcaattgcaaaattgtactgagtgccatacttttctactattttcccgctcaaacgtgagtagtcgtaacacataaaagcacctcctctcaagttcacgtatcatgaacttaactatactttacaccttgttttgaatcaagtcaatacaaaaattcatgatttatgaacttttttgttgaatttttgttcaacaagctttattatgaagttatcaaacggaggtgcactaaatgagagaaaaagtttcaaatagacttaaacacattatgaaaataagaaacttaaaacaagtagatatcattaataaatcgaaaccttatcaaaagaaactaggtatatctttaagtaaaagcactttatctcaatatattaacgacgtacaatcacccgaccaagatagaatttacctactttctaaaactctgaacgttggtgaagcgtggcttatggggtatgatgtagattcttatcgagttcctgatgaagaacgtcaagatgaaacgataatgtcaaaaatcaataacatattttctcaactcacacctccccgccaagaaaacgtacttaactatgcaaatgaacaattggaagaacagaataaagtcacttctatagatggatataaagagtctaaactagtatcgtatattgcatgtggtgcaactggtgctggcataggagaagaattatatgatgacatattgcatgaagaagtattttttaaagaagacgaaacgccatcaaatgctgatttttgtattttagttaatggtgattcaatggaacctatgttaaaacaaggaacatacgcttttattaagaaagaagattctattaaagatggtacaattgcactcgttgtattagatggagtaagtcttatcaagcgtgtagatatatgcgaagactatattaatttggtatctctaaatccgaagtatgatgatatcaaagtcgcttcgtttagtgatattaaagtaatgggcaaagttgtattgtgattaataacgtatatttagcgctttaatataaatataaacaaaggagaaattgacatgaaaaaagcaatcttaactttaagtcttatatttattacctactacctcacttttaaatatatgtggattaaagaattgaagtattaatcatgcttatttgaaaaagacgtctatttcagcagtgtttgaaaggaagtttataatgaaaataactaattgcaaaataaaaaagaaactatagtatatgaagttttaactagtggtaatcaaccattcacttatgagttacctaaagatttatcgtcacataatgcgcgtaaatacttggaatttatttcacaaaaattagatggcgataagttaaccaaagaagattcattatgattttactaaacaaaaaacgcctacaagtgtagacgttgaatggtggtgagaattttatggcggataaaaacaaaaaacaagaagctactcgtagtaacccaataaacaaaagttttgaaaagccgggtgccagcgaaaacttaaaaagcactttatcagaaaaagctaagaaaaaagattaatattcattcattaaatataaatccaatttaatttgttgtttaaggtctacaagtgtatgtttaatatacaattcatcgtttgacggtaaatcagatactttgaaatcttgtcgctcaacctctagtaaatcgaaatcgctaccagctgaattataggttttaagttcaccctcttcaatgattctgttttcaaagtctttaataactataaatactggtttaccgttgttattaaacaacttgtctcttttgtctaataagcttatacaatccaaattcataaactttcttgtttcattaattaaccagataatgaatttaacaattaaaggattaaatacaagcactgttaaaacaaaaataattagaaaccaaatatttgcttttagacctgtaagcaactgaagtaaactcaaattttttaaatcaacattattaaaaattataaaagtataaaaccatatcaaacatgtttcaatagaaaaaatcaataatacaggagtattgataatcttgtttttttcactaactaaacctatcattgttagatatttatatggtatgtaacctaaaactcctgtaagaagaagcgcccctagaaattgagtcatcttatcacctactttttattttattataacatatttagtacctagtactaaattttgggtagcccgcctacccttattattttttgccaattttgaggagggaacgcatgaaaacacgttgttacgatggtaaaaaatggcaatatgaatttaagcatgaaggaaaaagataccgtaagaaaggttttagaacaaagcgtgaagctaattctgctggactagacaagttaaatgagttaagaagtggttttaatatagataactatataactcttgcagaatacttcgaaaattggattaaaacatataaacaacctgttgttaaagaaaatacctaccgtcattatagaaatgcattacaacatatacaaaaacataaaataggtaaaatggagttatcaaagataaatagacaagtttatcagaaattcataaacgactattcaaaagaacacgcaaaagaaactataagaaaaacaaacggtgctattcggtcagctttagatgacgcattatatgatggacttatttttaaaaaccccgcttataaagttaattataaagccggaaaacctacgaagtcagaacaagaaaaattcatctcggtaactgaatatgaaatactaaaagatcacgtcagaaagaagagaactcgttcatcattagcgctattcataatgatttgtacgggttgtcgtgtcagtggtgcaagaaatataaagattgagcatatcaaccaagtgaaaaacactatatttattgacgagcgaaaaaccgatacttcccctagatatatcagtatcgctaaatctgatatgaaacacattatggacgtcataagtacatttgcaattagctatgatggttacattttcaaagaagccggatctataattaaccttcaggctatcaataatgctttgaaatcagcctgtagagtcaataatataccaattattacatcgcacgcattaagacacactcattgttcttatttactagcaaaaggtgtatctatacattacatttctaaaagattaggtcataaaaatatagcaataactacatccgtgtattctcatttgttagaagaaaaatttaatgaagaggacaaaaaaacaactaaaattttagaaagtatgtaatttagggacccattagggactccaaacccaataaatactgttgttacaaggtttctatgtatccaaactgggggcaatataaacgcgctgatttaatcggacaatcttcttatattaaaaataatgatgtcgtaatattcaatgaagcatttgataatggtgcatcagacaaattattaagtaatgtgaaaaaagaatatccttatcaaacacctgtactcggccgttctcaatcagggtgggacaaaactgaaggtagctactcatcaactgttgcagaagatggtggcgtagcgattgtaagtaaatatcctattaaagaaaaaatccagcatgttttcaaaagcggttgtggattcgataatgatagcaacaaaggctttgtttatacaaaaatagagaaaaatggtaagaacgttcacgttatcggtacacatacacaatctgaagattcacgttgtggtgctggacatgatcgaaaaattagagctgaacaaatgaaagaaatcagtgattttgttaaaaagaaaaatatccctaaagatgaaacggtatatataggtggcgaccttaatgtcaataaaggcactccagagttcaaagatatgcttaaaaacttgaatgtaaatgatgttctatatgcaggtcataatagcacatgggaccctcaatcaaattcaattgcgaaatataattaccctaatggtaaaccagaacatttagactatatatttacagataaagatcataaacaaccaaaacaattagtcaatgaagttgtgactgaaaaacctaagccatgggatgtatatgcgttcccatattactacgtttacaatgatttttcagatcattacccaatcaaagcctatagtaaatagtgctcaactaactaataacttgcttcgttctaaaaggacgaagcgagttatattgttaaaatttgaattgacttacattttaataaaatcatcttaacaactttaatttttcattaatacaagtctttactctacactcaaacaagattcatacactgcacgtcataataaatctatctattcaaatataaataaaagttacctactacattctatgtagcaggcaacttttattacttatttcttttcattatcattaagtacttttacaaacttcacattatgtgtcttccaatcaacttcatataatgctgataatttttcttcttttttatctacatggttttcaccagaccaatagccccagaaaccatggcgattccaatctattttaaactcatccattgatcttttataatgaacaacaaattgtgatttacctttgtcttttttatcatgtgacataacagctaaaaattctggattaaacccttcagacacagttacaggcattttgtctttaggtgtgaaattatctttcgcccataaatttccatttcgtgttaaagaaaaaatttcacttttagttctattatcactatcattagttaattgtctcgtatggtcatgtcccatattatttatcaaatgtgcttctactttccaacctacacctttatgtgacgtagattgatcaagtaatgtacgatatgatggttgttgataactaatcgtctctgaataattactctcttttgtaatatttccagttaagcctccacgattaatcgaaaaatctccacctgttttataaccatacgtatatttaacttctcttgattcatcctgattttttggtgcaaagtcagtcacatttgtattgttgttgtcatcaacattttgaattgaaactgaataagatccaggccatcttaatgtactattccaataaccatttgggtctaaaattctcaaaccactaccaattgtaccttttgctttaataaatactgtttctttatcataattaggttcagttaagaaattaaattgtaagctttgagtaatatttttttgactatcacttgttgtagctgtacgtgtatacattttagtatcaccatcaagattcttctcagaaacttgtttgatttcagaattaatctttgcaaatgaagtagctggtaatacagtgaaagtagtcgatagtgctaacgtacaaattgtgatatttttacatagttgtttaatcattagtaatccgccctttcaatattatccttctttataaggtttattgtcatcagaatatttatcaacgactttaactgttttatttttccaatcaacttcataagtgacaattaatctttgaccatctttatttttttctaaaattggaggtgcataatgtattccaggtctgtttttcaaaatatcttgatttcgtgtgtatgttacttcaaattgcgttttctcatttgacttttcattagataaataagttaaaaattctggattaaagccacttcttactaatgctgggtatctatattttgaagcaaagcttagttcagggttttctacagtagcaattctcgtatttctatagaataataattcatcatttctatttttcacttctccaccatacttcaagtcattcgcaataactgaccagtgtacatgccagttattatttttaccgctggcaattgtgtcataattttgctgattataactaatcgttttggagtagctatttgatgaagttcgtccaataccttttgttgaatcgaatttaccacctgagctatatgaaaatgtactgtctacttttgcagttgaaattttatttttcggcaattggtctaatatttcagttttacgatttctttttacttgaaaatctacatggtactcacttggatactttaaccaatttgaatttttttcttctttatgagattcaaactttaaatttgaatgaattgagccttgttttttaacaagtaatacattcttgtcataagttggatcatcgataaagtcgaattgtaaattttggagtatatttgttttctcatcatatactgtttcagttcgttttgtgattttaccgtttttcccaatatcatccggtgctgttgaatttttatctttattagtaacattacgtttgtctttttgttgagacttatcaacatgttctttcttattttggtcttgagagtctttatgagctgaatttgcttgagtcgttgctgctgataacaataaaattgcacatgataatgatgacgctattaaaacacgttttttatttttcattgttataaccttctttcgtatgattgatatttgttgatatgtatcgacatgtgaataatatcacaaaaacagagaatatatatttaactatttattaaatgattttgttaatattattaaatactttatcctctttaaaaataatgtgtgtacaaagtcattaatttagcaaatatttttatttagtagttaataaccatcgatttgaaatttatatataattattagctaaataatatcctgcatctttctcatacaatttactataaaattaagcatatccgatatcagcgttaataagatcgttgatactagacagttaatttcatagaacgaaatcaaataacacactactttctgcattttaaattatgtttaagaataaaaattatgtttatataaatatatatactactttgaaaggtgtgagcttaatgacaacttttagtgaaaaagaaaaaattcaattactagcagatattgttgaactacaaactgaaaataataatgaaatagacgtttgtaattatttaacagatttattcgacaagtacgatattaaatctgaaattttgaaagttaatgaacaccgcgccaatatcgttgcagaaatcggtaacggctcacctatactcgcattgagtggtcatatggatgttgttgatgcaggaaatcaagataattggtcatatcccccttttcaactgacagaaaaagatggcaaattatatggccgaggcactacagatatgaaaggcggtttaatggctttggtcgtatctctaatcgaattaaaagaacaaaatgaattgcctcatggaacgattagattactggctactgctggcgaagagaaagaacaagaaggtgccaaattattagctgataaaggctatttagacgatgtcgatggcttaattattgctgaaccaactggatctggaatttattatgcacataaggggtctatgtcatgtaaagtaactgcaactggtaaagctgtccatagctcagttccatttattggtgacaatgcaattgatacactgcttgaattttataatctatttaaagaaaaatattcagagcttaaacaacaagatactaaacatgaattagatgttgcgcctatgttcaaatcattgattggaaaagaaatttctgaagaggatgcaaattatgcatctggtcttacagctgtatgttcgattataaatggcggcaaacaatttaactctgtaccagatgaagcttcacttgaatttaacgtaagaccagttcctgagtatgataacgactttatagaatcgtttttccaaaatatcattaatgatgtggatagcaataagctttcactcgatattccaagcaatcaccgacctgtaacaagcgataaaaatagcaaattaattactacgattaaagatgtagcttctagttatgtagaacaagacgaaatatttgtttcagcgcttgtaggcgcaacagatgcctctagtttcttaggagataataaggacaatgttgatttagccatttttggaccaggtaatccattaatggcacatcaaatcgatgaatatattgaaaaagatatgtatctgaaatatattgatatttttaaagaggcttccattcaatatttaaaagaaaaataagaacgatgctgtcagctgccctattcgcgtgctggcagttttttattgcgaattttaagttgatagaaatagcgatgaatattgtttgaatgtaaatattcaaatatcaacaagcacattttcattgattaagtgatgtaaaactgaaattattgtgctgatttgtcatacatatattgactaatggtcatataaaaagatagcttctaatagttacataaaactcgtaaaaaccttctcgtaaaaggaatgggacataaatccctagaaaacagcagctcaacgagctgtaaattatcaaatacatttgaaaaaagctgatttctatcaaataatttatagaaatcagcttttttacattgtctaagaacttaatgtctctgtctctttggaactttatatttcataagtactattttattgtttaaccttttttttaaataaggtataaatctacaatatccaaataagccccatcgattcttataatagtcaaaataattatattcatgtattactcttattgtatttggtaaaatttcattcaatttttttaaatcattgtaaccatatttaaaaacaggttgtgaggataactttgataccgattgatgtctctttgtattattcgcaattgtttttgagcaaaattcaatcgcaaatgtcaaattatgatctcccatctttttgataatagtgtccaataattgagtcattacactctcatcaaaatacatcaatacaccttcaataataaacaatatatctgacttactattaaaaaatttataatttttgacatcatcaatccaactgtaatctagcatagatttagatatcatcttataactattactttctttaaaaaatgtttttcgtatttctattgattctggtacatctaaatctatccatgatattttttctttattaaatctttgaaaccttgtatctaagccacaacctatattgaccacgattaaatctttattatccttgataagcctcttagtaacacaatctattatcacagtacgtatactaattccaatttgagacatgtcatcacatgtaacatttttgtacatatcatctaaaccatcaaatattttttttgatagtgcgtcttttattattggtttttcgttttcgtactcttttgctcgagctatcaaaggaattaacattgattcgggaattccaaccagttgcttcatttaatcactccttaaaaacattagtaccaatgcataagaaaatttttacaacttatttctattattttttatttaaaatttctttttttaatttacttctcaaatgttctaatgtaataggatctgtgaaccaataatcttctgctttatatgaaattacatgtcctttttttacagcttcaatattctgccatgtatgtgttttttcaaaatcaaattttccgtacgaaggtttacttaaaaatatataatcaccagcatatttactaatattttcttttgaaatggaagcatagccttttttatcttcttgtaatttatctttatattgctttgtcattggcataccgaatgcatcatgaacaatatccaaaccacgaccccatgtagagttatatatgtatatttgcttttcatctggttcaaacacagatgctgttgcttgaccaattttactttgaatttcttttttatcttttctagttttatcgtcccactcttcaatccattttttagctttatcttcattattagtcaacttgcctatttcttttaatatttctttatgattgtatttattgtatgtatatgggattgttggcgctattttttggtatttttttatatttttatccatagcatctacaacaattaaatctggttttgctttagcaactctttcaacatcattttctccaatataatcaaccccttttaaataaggttttaaaattgaagaatctttagttatatctgaaacagcaattggtttgattcctaactttataaaatcaccaacataaaatccagttaatacagcaactcttttaggtttctctggtactttcagtgtttcaccattttcaattttatagtctgtagtctttgtcgagttacttgttttatcgacagatgctgaacacgcagtcaaaataaataaattacataataaaattccaattaatcttttcataatatcatccttttgtttttcaattgatattcattttcaattataaaatattaaaagaattagtcaacgcctgttagtaatacacatcagtaacatttctattttcatttatgatattatctaattattaatttataatataaaggagtatgaaattaaaatgaacaaagtccacaaacctttatatttttatttaatgcttttcttctctacaactatcataggtgcacttttattgtatttaccttttactggtaaaaagccaatatcttttttagatgccctatttatagcttcaagtgcatttacagttactggcttgtccccagttgatataggatcacagtttaatatacttggtgagatagtaatactattattaattcaaataggtggtctgggtatcgtgaccgtaaccctattgacactagtatttttaaatagaaagatatcaatgaaaaatagattcttgattatggttacatggaatattgacgaacctggtggtgttattaagctaattaaacacttggctatttatagtttagtcactgaattaattggtatgatttgtttgtgtttatcttttataccaaaatttggtataggcaaaggtttatttttaagcttattcacatcagtatcagcttttaataatgctggatttgccctttttaagaataacttaatagattattctagtgatccaattgtcattattacaatctcaatactcataatatttggaggtattggacattttgtcgtgatagactttattaattgtaaaaaattgagtaaattatctttacattctaaattagtcttaactacaactagtatcctaataattataggagctattacattctttttattagaacagtttaatactatgcaacatatgggactagttgaaaaaatcggaaattcttttttccaatcagtaacaacacgaacagcgggttttaacagtatagatatagcaagcattaacaaatctaccgcattaatgttaatgctacttatgtttattggtggtgcccctctcagtgcagctggaggaattaaaataactacttttgcagttgcgtttatttttgtactaaattatatacgtaaagaaaataatgtttcagtattcaataaagaaatatctgacaaacatataaaactatctattgttaccattaatatctcatttctatttatcagcatcattacttttatattatcgataattaatccgaacatatcattaatcaagttattattcgaagtggtttctgcattcggaacagtagggttaagtatgaaccttaccacagaatatcatggtattactaaaataattattatattcgttatgctttgcggtaaagtaggactattaactttattaagaacatttataccaccaaaaagtcctaaaaattaccgctacactaaaggacaaatttatctataaaataactatccatctttaataagaaatgaactagtgttttaatctattacattaaaaaaactacctaaacaggtagttttttatttattttaggccgattaaatgtcttatgtctttaattaagtaaaatgcacaagtacacctttaaaaagatttactcaaaactaaactatacctagttaaccgcttgtgattaagaaattttaaatgtggtttcttttaattatgtcaaccacccataaggattttaatcaagcactcattcattcctgcactcgcaatatgcattacttatagaagtggatgcactctcatattatggcaataccataactcccgcaccataatgatttaaataccattatgaatctcaattacaaattagcacataaaaaagacgcctcccataagtctagtcaccaaatggaaaacgtctcgtaattaaaatatatttgcgtgcattctaatttgtacttagaatacatcatactcgttcataatgtaattttctaattagtcaaaactatatacagttttacatcattcccggcattatgcactaataaaaacttactttaatacacgctttaaagattattaaatcagcgttttaatttttagacaacgctattatttttagtttttcaattctattatgtcataattatgtcactcaaaaactgttttccaacattgatttattgttggaaaatctcgaaaatctagtctatttctccaacaatcgaagaattatgcccttttttctccctttaaataagtcataatacgaggcatacatgcaacatttacaataaaatatgttcctacatcgtattatacgaatgctcacacttatagttgtttagtaaacccagatgtattgctaacatacccattatcactatatagtttatgtgcagatagtctttcatttctattaccactatttagtgttattgctttacaattcaaccgtttagaaaattcttcagaatcagctaataatctctttccataaccttttttcctaaattcagaatgtataacaaacgcaaggattctcatatactctgcatttttttcgtaaaacatcattttacacataccacttaaaccaattattttattttcttttatcaaaagcagtaggaagtaatcatcatgattcgttattttctttagtctcttttttaaatcattctcatttgttggataacctagatcatcatataatttacatagttgatttaatttttcaaaatcactgttattaaacaatcttgtaattatgctcatataacccaccctaaaaatattatgtacctattgttacatacaatagatacgcaaaatcatttctcactgcaaatcaggacgtttctcagcgtaaacaaatcatttctattcttttgaaaaatatctgcatatcttcacagtaattttataacagattaataaaattaaaaaaaacataacaacaagtattataataaatattataatagctatcgtattaaatagtttagaatatgcaaactgaaaaataaaaatcacaattaaaatactaagtaatgtaaatggtaatagcatcatcagatctttaacattatttctttgttcttgctcccaatcgctaatagccctaaaactactttttttatctataggcgatgtaaaaataccatatattgaaggtgctatacctcctaaaatagcagttcccaaagttgtcattactgaaattactgcgaaagtatcatccgaaagcaataaattcaaactaatgcattgtttattacccatcgaatttattgaccaaatagctagagaaataaacaacccaaaatttaaaataaatgatatagtaatagcaattgtttacaaaacacgaaatttttcatttttatttatattatccatttttctccctttttcttaaatcattttattatatattacaataatcaatctgaaatgttgatgtaatttgaaaaaaatatcatacttttactcctgaaaacctccctaaatcatcaatatgaaaatcagtattaggatattgcgtttacaactcttttaaatctcactcattcttctcatcgtcttaaccgatactatcaataaatactggcaacaccataaaatatatacccaatttataaaaacctaattgactcataatcttctaacggtatatcatccacaatcacagtatgattaggattatcgttagatacatctttcactgccttatctaacccctcatcacctccgtcccattcaccaatattaatgaatataggtacattaccgtttatatcatgcttatctgtaaataatttatgatatttacccaacatatcacgagcttttaaacgatcactaggttttattggtacctctatcagttcaacatgttcattatagactaattgtactttgccactttgtggattttctttatattctccacgcttgactacaacttctttcgtttctgtttcatcaccgactgccgcattcgttagcacatgtaataactcttttgcggttaatacattctcatctataatcttatctttttgttcttgtatatattgcttgatgtgcggctttttcaataacctacacgctgtcacatgtgcgctatttgcgttatatcctgcttttatggcactttgtgttacattcagtgttctaatatactcattcacaaaacgtgcttgctttgcagttaactcactcattttatcacccccacaattttatctaatatggtttcataccataatattacagattgttctgaacaatctaaggcactactaatatcttgataactaagtccttgtataagggagtcaaaaatataaaactctttatcggtcgctaatctgtcaacaatcatttctatgtgattctttataatatgatcattgacattatcgtctgtcatcaattcgtcagaatcttcatcacctattaaaaagaaatcatcagtatttatttcatcatcgccccgttaactagctttgaagtctttagcacacttgcatataccggctgtcgtgctggcgagatactagcattgaagtggtctgatattgattttgaaaacaacacgattagtattactaaaacatattacaatccaaataataacaagaagaaatatcagatacttccccctaaaactgaaagttctatcggtaagatttccgttgacccaaatgtaataaaggtgttgcgtgattataagataaacgttcaaaataattggaaaaacgaattatataatgataaccattgtaatgaaaaaactatcaatgtggatacaaaccattatgtcacgtaccagcatactcaaaaatatctctacgcactcattcagatacacacattgcgcattgctcatagaatcaggtgtacacattaaagaaatacaagaacgattacggcataaagatatcaataccactatgaatatctatgctaaaatcacaaattcatacaaaaaagacgcctcccataagtttagtcaccaaatggaagacgtctcgtaattaaaatatatttgcgtgcattctaatttatacttagaatgaatcatactcgtgcataatgtaattttctagttagtcaaaactataaacagttttacatcattcctggcatgccacccatgttaggttggtcattatttttttctggaattgatgctacaaccgcttcagtcgttaagaacattgctgcaacacttgcagcatgttgtaatgctgagcgtgttactttagttggatcaacgataccttcttctaacatattaacccactcgtttgtagcagcgttaaaaccaacacccggctctgcgtttttcaaacgttctacaataacagaaccttctaatcctgcattttcagcaatttgacgaactggtgcagttaatgctttaagtacaatatttacacctgtttcaatgtcaccttcagcttcaatttcacttactttttggtaaacatttactaatgcagtaccaccacctgcaacaataccttcttcaactgctgcacgtgtagaatttaatgcatcttcaatacgtaatttacgttctttaagctctgtttcacttgctgcacctactttgataactgcaacaccacctgctaatttagctaagcgctcttgtaatttttcacgatcaaagtcagattcagtttcttcaatttgagatttcaattggctaacacgtgcatcaatgctgttttcgtcaccgtcaccatcaacaacagtggtattatctttagttacttctactttacttgcagtacctaacatatcaattgatgcatcttttaaatctaagcctaaatcatcagtaatcacttgcgcaccagttaaaatagctaaatcttcaagcatcgcttttctacgatcaccaaaaccaggtgcttttactgcaacagctgtaaatgtgccacgcatacggtttagcacgatatttgttaatgcatcgccttcaacttcatcagctacaattaagattggacgattagattgaaccacttgttctaataaaggtaagatatcttggaaagacgagattttcttatctgttactaaaaagtatgggcgttctaattcagcaaccattttatctgaatcagtaaccatatacggtgattgataaccacgatcaaattgcataccttcaaccacttctagttcagtgtttagtccatttgattcttcaattgtaatgacaccatcgttacctactttttccatagcttcagaaatataacgtccaatttcttcatctgctgctgaaatcgcacctacttgcgcaatttcatttttattttcaactttttgagaattttcatgtaacgcttcaacagcaactttaactgctttgtcgataccttgtcgtaaaccaactgggttcgcaccacttgtaacatttttcaagccttcttgaatcattgcttgagctaatactgttgcagttgtcgtaccgtcaccagcaatttcatttgtcttatttgcgacttcttgaactagtttagcccccatattttcatatggatcttctaattcgatttctttagcaatcgtcacaccatcattcgtaattaaaggtgctgtaaactctttatctaatacaacattacgtcctttaggaccaatcgttactttaactgcatttgcaagttggtcaacaccacgtaacattgcttgacgtgcatcttcagagaatttcaattgtttaaccataaatgataaacctccatttgtttagttgtgtttcattttcgttctatttaatttatttatgaattaagttctgtattattcaataactgctaaaatatcttcttcatttaataccagatatgtttcattatctcgtttaacttctgtaccagcatattgttggaacacgacacggtccccttctttcacttcaggagtcactcttgtaccatcatttaataggcgtccagttcctactgcaacgataacgccttcgtttgatttttctttagcactatcagttaaaacaataccacttttagttgtttgttcttgttcttttttctcaataatcacacgatttccaattggttttagcatgattgttcctccttaaaaaacctaaagtttagcacttaacattaaagagtgctaacatacatttataataatcaaatttggtcaaaatttcaagtcataaccttttaattaagttttgtaacttcaagttatttacgataaaataaattataaacaaatatttggaggaaaattatgacaagattatgggcatcattgctaactgttattatttatatattgtctcaatttttaccgcttctcattgtaaaaaaattaccatttgtacaatatagtggcatagaactgactaaagcagtcatttacatacaacttgttctatttttaatcgccgccacgacgattattttaattaatttaaaaattaaaaatccaacaaaattagaattagaagttaaagaacctaaaaaatatatcattccatgggcattgcttggatttgcattggtaatgatttatcaaatggtagtgagcattgtattaacgcaaatttatggtggacaacaagtaagtcctaatacagaaaagctaattattattgctcgaaaaatacctatatttatcttctttgtatctattattggtcctttattagaagaatatgtattcagaaaagtaatctttggagaattatttaatgcgattaaaggtaatcgtatcgtggcatttattattgctacaacagtaagttcattaatatttgcattagcacataatgatttcaaatttattccagtttattttggtatgggtgtcattttttcattagcatatgtttggacaaaacggcttgctgttccaattattatccatatgttacaaaacggatttgtcgttatattccaattacttaatcctgaggctttgaaaaaagccacggaacaagcgaattttatatatcacatttttattccataataaaaaaaacgaatcacacacggattatcgtcgctgtgattcgtttttatttttctttttatttcgctttacaaataagaatagcatgattgaaaataccaccatcatagaacatacaattgctagccaacttttactatatgcagttgacgcacttttcttattatcttcttgttttttaactactgtaaaatcgtctttttcatgcggttcaaatgagcgttgttttgaatccggcttatcttcgggctttttcaaatctggcattgatccaatttcaccagtaattaatgcgagtacttgttcatctaaattacgatagtacctttctgatttcaatggattgaaatattggaatctaaagtaattcgattgctgttgtaatccatttaaatatgcatttccgctgaaattttgttttcgaataatattataaatgtcttcatcagtaacttctccataatctttgcccaacttattaatttgatttaaaatatacggattatacttgtaagccccatttgccaaggctaaaaatcgttgggatacaaaatcattaccagtaggattttgtgagtttccttgattcccatttggttgccattgaccttgattagatccatctgaagcatttgggttccatgtccccccatttttcgagccaccagaatgattggaatccccaggttgatcgggatctggtgacgggttaggatttggcttattagggtctggttttggattcggatttggctttggtttatctggatctggttttggatccggatttggctttggtttatctgggtctggttttggatctggatttggtttcgggttatctggatctggttttggatccggatttggctttggtttatctgggtctggttttggatccggttttggtttcgggttatctggatctggtttaggattcggacttgagttttggttatttgggtctggttttgaatctgtacttgggttttggttgtttgagtctggcttcacattattcgaatcaggattagcatcacgactattcgaacctgttccttcattacccgtttgatttgattcgtgaggtgtcccagtctcattattattcatttcactatttactgatggtgaagttatattatgattcaaattagtagttggtttttctccatttaagttatcctttgcttcaactgtgtgcgttgcaagccctaaactactactacttaaaattaaaatacttgttgaaagtaacattttcttaaaccaatgatatgacatttcacgagacacctccctttttcatgtaagtattaatctaagtataataaatatgcgttgaaaatgcatttatatttggaatttgaaaatgaatattaatattcttgaaattttcgtaaatattgctttacaagtacgagtataaattttatacttagtctattaagtattctttactaaagaaggagcaataattatgggcttatttaaaaaagataaaaaagcaatgacttttgacaatgcaatggaagaaagacgttcaatatataatttgaaagattcgatatcaattagcgatgacgaattagaatcaatgattgcacatgcagttaaacatgttccttcatcatttaattctcaatcaactagaattgttctcttgttaaatgacaacaataataaattttgggataacacaaaagcaattttaaaagaagtcatgggagagaatcgtgatttcgagccaactgaacaaaaaattgataacttcaaacattcatacggtacaattttgttttatgaagatcaagatgttgtaagtggtttacaagaacaaatgccaaactactatgataattttgcaatatggtcaactcaaacaaatgccatgcatcaatttgcaatttggactgcattagctactaaaggcataggtgcttcattacaacactataatccacttgttgatgagatgacttcaaatgaatttaatattcctaaaagttggaaacttattgctcaaatgccatttggtgatattcgtgaagctgctggcgaaaaaacatttaatccagtggaagatcgtttcgtaataaaaaaataatcaatatattgttaggaatgggacagaaatgataaagaatcattagttattcattatgtagtagttcttacacattagccgctgctaatgtgcacttaagaataggaatacatgagtaaaactcatgtataagaaatactaatttctaaagaaaaagtatttctttatgttagagcccaccccaacttgcattgtctgtagaaattggtgttccaatttctctatgttggggccccatcaactactgtcaatataactttgtagagcctaggactttgattttatgtcttgtgctcgttttttgcgtttcaacataacttttagtaagttatatataagatctatcaaggatgtgatgttatgaaagtccaaatttatcaattaccgattgtttttggagatagttctaaaaatgaaactcaaataacgcaatggttcgaaaaaaatatgaatgctgaagtagatgtagtcgttttacctgaaatgtggaataatggctatgatttagagcatttaaatgaaaaagcagataataatctaggacaaagtttttcatttattaaacatttagctgaaaaatataaagtcgatatcgtagctgggtcagtttctaacattagaaacaatcaaatatttaatacagcttttagtgtgaataaaagtggccagctgattaatgaatacgacaaagttcatttagttcctatgttaagagagcatgaatttttaaccgctggcgaatacgtagctgaaccctttcaattgtctgacggtacttatgtgacccaacttatctgttatgatttacgttttccagaattattaagatatcctgctcgtagtggtgctaaaattgcattttatgtggcgcaatggcctatgtcacgtcttcaacattggcattcattactaaaggcacgtgcaattgaaaataatatgtttgtcattggaactaatagcactggattcgatggtaacacagaatatgctggtcattcgatagttataaacccaaatggagatttagttggagaattaaatgaatccgcagatattttgactgtagatttaaacttaaatgaagtagaacagcaacgcgaaaatatacctgtatttaaaagtattaaattagatttgtataaataagaagcgcccgaaataatatttaacacatgtcatgactaaacatagatttatgagagatttttcataagtctatgtttatttttttataatagataactcagtaagaacccatttcgccctttgcaaatgaatgattttcttaattaaattgattaattttttgaccttttccaacattagacttattcatatattttaacggcgggtctcataatgatgattaactcatcccttcttcattacaaaaaaggccgcgagcttgggaggggctcacgaccatacttattattaagggaatgttttacagttattttttcaatctatttttggggatgttattaattatgaaaaaaattttatttatcaaataatgataaatcgatgttgtttacgatagcttacatgctagaaataattatctgtaatgataattaagaaaaatacatagcactgagtccaaggaaactaactctactagcaaatgttactcacttgctaattttacatggttattaagttgggatggcttaataactcatacttttagtactatacgaagataacaaatttacaatgaaagtaattaattattcatcttattttttagtgaatttgttcactgtgtcgataatccattttactaagtcaccgattgttgaaatgatatcttgtgccattgaaatcactccttccttaattaagataaaaattcttaaaattaaacaactcatcaactattttccatcacatctctgtgatctagttatattaaaacatgctaaaagcatttattttccaatttttcttaactagtcgttttttattcttaactgtaaatttttttatgttaaaatattaaatacaaattacatttaacagttaagtatttatttcctacagttaggcaatataatgataaaagattgtactaaatcgtataatgacagtgaggagagtggtgtaaaattgaattattttgataataaaattgaccagtttgccacgtatcttcaaaagagaaataacttagatcatattcaatttttgcaagtacgattagggatgcaggtcttagctaaaaatataggtaaattaattgttatgtatactattgcctatattttaaacatttttctgtttacgttaattacgaatttaacattttatttaataagaagacatgcacatggtgcacatgcaccttcttctttttggtgttatgtagaaagtattatactatttatacttttacctttagtaatagtaaattttcatattaactttttaattatgattattttaacagttatttctttaggtgtaatctcagtatatgctcctgcagcaactaaaaagaagcccattcctgtgcgacttattaaacgaaaaaaatattatgcgattattgttagtttaacccttttcattatcacacttatcatcaaagagccatttgcccaattcattcaattaggcatcataatagaagctattacattattacctattttctttattaaggaggacttaaaatgaatacattatttaacttattttttgattttattactgggattttaaaaaacattggtaacatcgcagcttatagtacttgtgacttcataatggatgaagttgaagtaccaaaagaattaacacaattacacgaataatttaaatagagagtgtgatagtaggtggaattattaaatagttataattttgttttattcgtattaactcaaatgatattaatgtttacaataccagctataattagtggtattaagtacagtaaacttgattattttttcatcatagtaatttcgacattatcgttatttctatttaaaatgtttgatagcgcgtccttaatcatattaacttcatttattattataatgtattttgtcaaaatcaaatggtattctattttgttgattatgacttcgcagattattctatactgtgctaactacatgtatatagttatatatgcatatatcaccaaaatttctgatagtatatttgtaatattccctagcttttttgtagtttatgtgactattagtatactattctcatatataataaatagagttctcaaaaaaattagcacaccatatctaatactaaacaaaggatttttaatagttatttcgactatcttactgcttactttttcattatttttcttttattcacaaataaactcggatgaagctaaagtaataaggcagtattcttttatttttattggtatcactatatttttaagtatattaacatttgttatttctcaatttctccttaaagagatgaaatataaacgtaatcaagaagaaattgaaacctattatgaatatacattgaagattgaagctatcaacaacgaaatgcgcaagttccgtcatgattatgtcaatatcttaacgacactttcagaatacattcgagaagatgacatgcctggcctacgtgattatttcaataaaaatattgtacctatgaaagacaatttacaaatgaatgctataaaattaaatggtatcgagaatcttaaagtacgtgaaattaaaggcttaattactgcgaaaattttacgtgcacaagaaatgaatattccgattagtatcgaaatacccgatgaagtaagtagcattaacttgaatatgatcgatttaagtcgcagtattggtattattcttgataatgcaattgaggcatcaactgaaattgatgaccctatcattcgcgttgcatttattgaaagtgaaaattcagtaacgtttattgttatgaataaatgcgctgatgatataccacgcattcatgaattgttccaagaaagtttttctactaaaggtgaaggtcgtggtttaggtctatcaactttaaaagaaattgctgataatgcagacaatgtcttattagatacaattatcgaaaatggtttctttattcaaaaagttgaaattattaacaactagccataaggatgtgaatgtatgaaaattttcatttgcgaagacgatccaaaacaaagagaaaacatggttaccattattaaaaattatataatgatagaagaaaagcctatggaaattgccctcgcaactgataatccttatgaggtgcttgagcaagctaaaaatatgaatgacataggctgttactttttagatattcaactttcaactgatattaatggtatcaaattaggcagtgaaattcgtaagcatgacccagttggtaacattattttcgttacgagtcacagtgaacttacctatttaacatttgtctacaaagttgcagcgatggattttatttttaaagatgatccagctgaattaagaactcgaattatagactgtttagaaactgcacatacacgcttacaattgttgtctaaagataatagcgttgaaacgattgaattaaaacgtggcagtaattcagtgtatgttcaatatgatgatattatgttttttgaatcatcaacaaaatctcacagactcattgcccatttagataaccgtcaaattgaattttatggtaatttaaaagaactgagtcaattagatgatcgtttctttagatgtcataatagctttgtcgtcaatcgccataatattgaatctatagattcgaaagagcgaattgtctattttaaaaataaagaacactgctatgcatcggtgagaaacgttaaaaaaatataataagataataaagtcagttaacggcgtattcaattgtaaatcttgttggattttaacaagataactagcaaatgcactgtatagctggctttttaattttattaacaaaattaaatatgacgcgtgaattaaaaaatgatgtaacgtctctttgtatacctattcctattactacataatttatcaatttctatttcactctacaatcctatggcgcaatttttaacaaaatatactaaatttgaaattgacagtttccataaataaaatgctataatttcctactccgtgaatcttattttgttttaaaaaacagtgtagcacaagattcaacttgtttcctacactgttttataaatgaattatttaaaatgcttgttcaacctcttgtaatgttggcaaactattaatagcaccatacttcgttgtcactattgcagcaacgcgattgctaaacgctaaaatttcctcaccttcattttcaaataactgagttaaatttaacacatcggttgctaaaatcctgctaataactgcaccaataaatgcatcccctgccccagttgtatcaacaggttttaccttatagccactatgataatgattaataccatttttcaaatatacggcagcaccatctgctcccttcgtataaatgactacagtaacattacctgtaaataatgattgaatggcttcattttcatcatgaatacctgtaataaattctaattcttcatctgaaacttttacaatatgcgccaatggcaaaaaggtatgaatagtttgtcttaaatcttcagcgttatcccataatggcaatcttacattaggatcaaatacgacagtaccatttgcatttaatgttttggtaatcaattgataatgtgcatctctcatcggactatcgaccaaatcaacagaacaaaaatgtactacatcattttcattcacatcaatatcattcacaaaacttggttcaaataacatatcagcagagggcttacgataaaaagaaaaatctcgctcgcccgcttcagtcaaactcacaaaagctaacgcagtgtttgcttcattcgtgcgatacacttttgatacatctacaccaatacttgatatcgtttcaataatgctatctccaaatgcatcattacctaattgtgtaatcatatacgcttgttgtcctaacttttgaactgtacaagctacattgcatggcgcgccaccaatttgcttcgtaaatgtttgaacatcttttaaattcgcatttgtaacatttggaataaaatcaattaacgcttctcctattgaaaatagacgtctcatttatgttcatcctttaaatcatatttagtaaattgtaaatatacttgccctgattctgttgatgttttaatacctagtgcgtcttctgtcgggaaaattcgagatgtcaaaacacgttctccatcattacagaaaatttctatactagatgtatcaacaaaaatttgtaattgctttaatggcgtgtctaatatcgtactacgcgtcgtaccttcaacatttgtcggcaataaaccactgtcgctgcgatctaatgttattttattttcacgcttgttataagcaattaatgttgaagaagtcttagatgtacgtaattcaaagtacacttcggtagcatcattatccaaaatatctatgattaattcatactgtttaccttcatacggatgtaattttcgagtaaatttatttgcgtagcctaatgctgtctctttattgtgacgtaatttttccaacgctggatatggacgttgcttaagttgaccattttctacatttaatacacgaggaattgttaagcaatgggcccatccttcattatcagtaggatattcgatttccggtaaccccatccatccaattagtactcgtcggcctttttcatctaaaaatgtttgaggtgcatagaaatcaaaaccattatcaagctcgacaaaattttcatgttcatatgttaacttttcaatatcaaactttccaagtatataaccactttgataaatatttttgaactgatcgccttttggttcaataccttgtggacaaataagtatgacatcttgattatctacattaaagtaatctgggcattcccacatatatccaaaatcatccaactctgtatttatttcacctaaataatgccaattaattatatcttcagtattataaagtaataatcgaccttgctgatcattattttgtgcaccaatgattgcataatatttctcatcatatttaaaaactttaggatctctaaaatgactcgtatatccttctggttgttggctaattactggctttggaaacttttcaactgaaccgtcttctttcaatcgtgcgatcatctgactcgcatgtcgttgccaatgattatctcgatgatttcctgtgtacatataatataaatgcccgttatattcaaaagcgctaccgctatatacaccatggctgtcatatttagtatctggatttaaaattggcccttcagctttaaagtttattaagtcatcactcgtgtagttataccaatactttaagccatgtactgcgcctaatgggaaccattgatgtgaaacataatacttccctttataaaaaataagtccgttggggtcatttaataagcctgtttctggttgtatatgaaattgttgacgaaattttgattgatcaacttgttgttttaatgttttaaaatactcagtatcaacgtcctcgattcgttgataacgttcttctctagtccattcggtcataatatttacccagtcctccttttataatttatgctgttaacaatttatattctattatagcaaattttacctacgttctttaacttttaacctatccatttatagttatatggtatcggttccacatttattttaaaaaatacagcgtctaaatattaacatctactgtgacgctatatggcatatcttgctttttaagcatctgttgtatctcttccatcgcgcattggccagcttcaaaataattataatgaattgtttttatcgatggagacactaattgtgtcattgggtcaccaccaaaaccatatatttgatgtggtttcataacatcttttttatcagaataatatttataggcagctaatgcaatcgtatcagttgctccaacaaccgcatctacttgctccacattttccaaaacatttgcaacatctttttgtgcttccacataagtaaaatttgtttcatgtatattaggtttaatttggtatttagctaactggtcaagtaaaccacgttttctatgtataccaactgcaatatctttttcacttacactaaacacttcaacttgttgatatccctgttgaccaatccattcgcctataatttgacctgctttataatcatcatgcacaatactatgaagttgttcatgttgttgaccaacaataacgattggtacattcattttattaatgacttcaatatgtctctctgttatgtctgtagccattaaaacaataccatctactttactgcgtgctaatgtttcaagcgcttgtatttctgcttcgatatttaaacctgtgtaatttaaaattaattgtgattcatatttttggcattgttttgccaatcctttgattgtttcatctactgcatatgaattcattctaggtataatggcaccaataaggtgtgtttgtctcgctcttaaactttgagcaaattgattcggttgatagtcatgttctgctataattcttgttaatttttcacttgtttttttactgacagatccattatttaaaaatctagatactgtactttttgaaacgcctgccaatttggcaatatcagatatatttttcatacttattcacctatcattatttgtgacacttagccttattttagcatatgtgtaaccgctttaaataatatttctgcttctttcataaaaagatttcaaaataaaacttttgtataacaaaatgtcccaacatcaacctttagttaaatgtcaggacaatgaatattctatgtaaatatattctaatatcgaatatgtttattgaatctatttagctcaccttcaaagtaagcatgttcaccgtgaacaatcttgtctaatcctatattcgtttcttgttccgtaacagataatggtgtaattaatttaattactttcgcaataataaacgtcatgactatactaaaaattacaactgctgttacacataatatttgtacaagtataatatgtatgtcaccagtataaataaagccattctcaatgtcaggattggcttttttactttggaaaactgctgttaaaacagcaccaataataccaccaacaccatgaataccaaatgcatctaatgcatcatgatattttagttttaccttgatgtaattaatgacaatataacaacagatacctcctattaaagccattattgttgcactaagatatgttacatatcctgctgcaggagtaatgacaactaatcctgctaatgcaccgagtaaaagtccaagtaaacttgtcgtctttttaaaaatatattctaaaattaaccaacctatagcacctgcactggctgaaatgacagtatttgtaaatgcaagcatcgcaatattatcaaatgtaaaagcactacctacattaaatccataccaaccaatccacacgaatataccgccaatcaacgtaatgataagattatgtggtgttgattcagaatgtttgtttccttttccaatcataatagctaatactaaaccagaaacacctgatgtaatatgaacaaccgtacctccagcgaaatctaatacaccgagtttgttaatccaaccgccgccccaaacccaatgtgctactggactgtatacaagagcagtccatattactacgaataataaataaggaataaacttcattttctcagcgattgaaccagataaaatagaaattgcaatcgtacaaaacatcatttgaaataacataaacaaagcgaaaggaatatgtgggctaatatcttcttgagtcgcaaaacctacatgattaagaaaagtatattcccaatttccgaaccataaattcccattcccaaaactaattgtaaaaccaactgttatccatacaaatgtaacaagcacaattgctgccatactttgcatgacagtattaagcgcatttttagattgaactaacccaccataaaataaacttaatcctggtgtcattaaccaaactaataatgtacacaaaaacataaatatcgtatcgttaagattcatacttaccactccctttttttcataataatctgacaatttataaaaagcaaaaatgcgttaagttttattacatcttttggaataaaatgtgccacactatataaaaatgatttcatgaactaaaaaaaaaaagactacttactcacttttaaattagcggaagtagccatagaatctaatatctattttattgttaaaatgataacgttaaactttttgaattgtaattgtccatgaagcattatcaatttgttcatagtttgttacaggataaccattttctgcagcccaatttggaatggcttccgtcgcttgcgtgcaatcaaaatcaatttttaattcatctccagattgcaatgttgccattttcttttgcgcttcaattaacggaaatggacataccattcctactgtacctaattcgtgtatcataattatttctccttttccaatcacttttatttgatcaacatcatttgcataataatcttctatactatttgcgtttgctgtttaacctttgcagattgttggtgtacttttttcattggacgaacaaagataaaatgactcattgtccatacaccaactatcatcgatgctagcgcaatccatccttgccaagtcatcgttgccgtttcaaccaaaccgttaccgatagaacaaccaccagcaactgacgcaccaaatcccatacatatgccaccaatggcactgtttcgtattgtaatcttgtctggcaatcgccatttaaattctcttgatcctctagctgcaatatatgaaccaatgaaaattcctagaactaaaaagacaccccaatcaataaatttagtttcacctgtaatcaaaaagtgtactaaatttgctgaaggcgttgttatacctaaaccgtcatttcttccagttgatgcactcattggccaagctaagagtgcgataagtccaattacaattgctgcaataaatggatggtatcgtttttcgaaaaggtaatatctaatacctgtataacgttgctttagttttggaacagcaactcgaactttcttattattgagtgttcttacaactagaaaaatggtgattatagttaatataacgactaatccccaaaacggaatgccagttgtttgagacatatcactatttacattcgttggttgattaattttatccattactggctttaaaatccctgttttagtgattgctgcagtaacagcatataatactaatgcaatccaactaccaattagcccttcaccagcgcgataccaagtacctgttgcacatcctccagccaatactattccaattccaaaaataaaagaacctataattgttcccaatattggaaaactatgtgcaggaatttgtaaaatatctgttgccgtcaaaatcaataatcctatactttgaatagtaatagcgattaataatgcatagaacatcttattattcttttgcacatacatatctcgaaagccacctgttaaacaaaatcttgttctttgcatgacaaaacctaagagtcccccgacaattaagccactaaaaatcatccacataatcctaacctctcatttccgataagtttagtatgtattataggtgatgattttcttgttttcaaccttatacacaatatttttgatatttatattatattcatataaggaaggcgattaattacgattcatcattatatctctacgtgttaatttattaacctatactatatttatcaacacaacagtttttcctttcattttcaaacataacagaaaaagcctgagacatacttagtcccagactgttctataattaattaaagatataacaaggttaatcattcaaagctaacatcacatttattcactgtaatttttcataaagaataataatgactgtaattctatacctaagtcaatttgatgtacttgcacatctgaaggcgtattaattctaccaggagtgaagtttaaaatacctttcacaccagcttggacgagttcatctgcaactttctgtgcaactctttctggtgtagttagaatcacaacatctatttcttccttcttcaatgttgttattaattcatcgttatctttaacaataacgttccctattttctggccaataacatcttcttttacgtcaaacgcttctgtaatcgtcatatcgtcatgtattgaaaagttatatgtgagcaaagctttccctaggttcccaactccgacaattgcgattttgatcatgtcactctcgcttagttcagatttaaagaaatccaataaactatctatattatatccgtacccttttttacctaattcgccaaaatatgaaaagtcacgacgaattgttgccgagtcaatttgtaacgcatcgctaatcgcttttgaatttacacgatctatacctttagattttaatgaactgacaaatctataatataacggcaaacgttttaaagttgctcgaggaattttaacttggtcactcattcgctatttcctccttcgtgtttgaatgaattatatctatgtattcaaacgagttagagcgtaattgttagattattaaaaaacaaataattgattacaatgaatacctaaatattatacattattgaattttaaaaataaatatcttagtttcaagacggcgttttatactgtaaaatggttattaatgtaataattacgacttgtttcataagttaataaaatttgagaaagacgaaaggtgaagatcgaatgatacttttacaactcaatcatatatcaaaatcgttcgatggtgaagatatatttactgatgttgattttgaagtaaaaactggtgaacgaattggtatcgtaggaagaaatggcgccggtaaatcaacattgatgaaaattatagctggcgtagaaaactatgattctggaaatgtgtcaaaaattaaaaacttaaaactaggttatttaactcaacaaatgactttaaattctaatgcaacagtttttgaagaaatgtcaaaaccatttgaacatattaaacgaatggaaagcttaatcaaagaagaaacagattggttatcaaaacatgcaaatgattacgatagtgatacatataaaacacatatgtcccgttatgaatctttatcgaatcaatttgaacaattagaaggatatcaatatgaaagtaaaattaaaacagtactttacgggttaaattttagtgaagaagatttcaataaacctatcaatgattttagcggtggccaaaaaacacgtttatctttagctcaaatgctattaaacgaacctgatttattacttttagatgaacctactaaccacttagatttagaaacgacaaagtggcttgaagattatctacgttattttaaaggtgcaatcgtcatcatcagccatgatcgttactttttagataaaatagttactcaaatttatgatgtggctttaggtgatgtcaaacgctatgttggtaattacgaggaatttatacagcaacgggatttatattatcaaaaacgaatgcaagaatatgaaagtcaacaagcagaaataaaacgattagaaacttttgttgagaaaaatattacccgtgcttcaacaagtggaatggcaaaaagtagacgtaagattttagaaaaaatggaacgcattgataaaccaatgttagatgccaaaagtgcaaatattcaatttggctttgaccggaatacaggtaatgacgtcatgcatgtaaaaaatttagaaatcggttatcaaactgcaattaccaaacctatgagtatagaggtctctaaaggcgatcatatagcaatcattgggccaaatggtattggaaaatcgaccttaattaaaactattgctaatcaacaaaaagcgcttaatggcgatattactttcggcgcaaatttacaaattggttattatgatcaaaagcaagcagaatttaaatctagtaaaacgattttagattatgtgtgggatcaatatccgttaatgaatgaaaaagatattcgagcagttcttggacgtttcttatttgtacaagacgatgttaaaaagataattaatgatttatctggtggtgaaaaagcacgtttacaactagcactacttatgttgcaacgtgacaatgtacttattttagatgaacctaccaaccacctcgatatagattcaaaagaaatgttagagcaagcactccaacattttgaaggaacaatactatttgtttcccatgatcgttactttattaaccaattagcaaacaaggtatttgatttaacaattgatggcggaaagatgtatttaggagattatcaatattacattgaaaaagttgaggaagcggaagcgttgaaagcgcaccaagaagaacagtcagttaacgtacaagcacataaaaagtctatggaacaatcgtcgtatcataaccaaaaagaacaaagacgtgaacaacgcaaacttgaacgacaaatatccgagtgtgaaaatgaaatagaaactttagagactactatcttacaaatagacgagcaattaacccaaccagaagtgtataacaatccacaaaaagcaaacgaattagctatccaaaaacaagatagcgaacaaaaattagaacacgctatgtctaaatgggaagaattacaacaaaaactataaaaatatacataactctaactgtaaaatcgctatagttagagttatttttttacaaattttaattttttttattcacaataaaaacgctgatattatagctatccacagacttatcctagttacccacaagtaaattaacactaatcaatcatttattttctgttttcccacctgatatccacaataaatgacgttatcaacaccttttatccacaagttattcactctttgttgataagtacgcatgttctctattgacattgtttttatcaaaattcattgttaagacattttctttatgaaataataataatattgaagtatatttttattattattaaaaataaataaggggatacttatgagcacaaatcaaacatttttaatatttgttatagcaattattctacttacatctgtaataggaattgttggacgatacatgagtcgtcaacgtctattaaaatctatggaaacattatggcaaacgatttctccattagaagcttttatcagaccgaactcacatttcgactatgagtataagctctacaaggaaaaatttgaatcacattcattagttgatgataaaacttggtccgacttaaatatgaatgcaatctttcataagatgaattataatttaacagctattggtgaaatgaagctatatgcctgtttacgtggaatgctttcaattacgaacaaatcattacttagtttatttaatgataatgctgaatttagaaaaaacgtaacatatcatttagctttgattggtaaaactgtttatccaacatttccagaccaaatcacaccggtaaaacgtcaaaatatattgtttctatgcccgtttttaccagttatctcatttgcagttatatttattaattcacaagttggtattttattatttcttatgagttgcctatttaatatcattttatcagcaactttaaagcgtacatatgaggatgacttaaaatctatcttttatgcatccaatgttttaaaacaaggctatactatctcaaaaattaaacatgctccacaacctgaagtcaattttaagcaatttagaacagcacgtcatttaacgagtgttttagctgaagttaatgatgaagatatcggagctatggtaattaaactagttaaacttattttcatgcttgattatgttttatttcattcaattcaaaaaagctatacaacacatatgaatgagcttaaaaattgtttcgattacatagctgaattagataatcattatgcattagcaatgtatcgtagaacgctagaatgttatactgaaccacaaattgatgattcaaatgatggcatagtattctctgagttaacacatccactcatagcagatgcagtagccaatgatttctcactatcacaaaatatactgttaactgggtctaatgcttcgggtaaatcaacatttatgaaatccatagcaataaacattattcttgcatcggctatacaaacagttaccgcaagcaaatttgtatatcaacctggaattgtgttcacgtcaatggcaaatgccgatgatgtgttatcaggcgatagttattttatggctgaattaaaatctattaagcgtattgttgaaattccagataatcaaaaaatatactgctttatagatgaaatttttaaaggtaccaacacaactgaacgaattgccgcttcagaatcagtactatcatttttacatgaaaaatctaactttagagttattgcagcaacacatgatattgagttagctgaactcttaaaacaacgttatgaaaattaccatttcaatgaggtaatagaaaataataacatacattttgattacaaaattaagcctggcaaagcaaatacacgtaatgccatcgaattattaaaaatcacttcatttccagcaaaaatatatgaacgagcaaaagataatgtcccgaaaatttagcatttaactttaaacataaaaacgtcagctatcacatgacagaagactatgaacagtttcaataatgttcatagtaatcatgttaataactgacgtttattttattctgcagaatactcttctaaatctatattgctgtgcccatttaatgctaaatcagcaaatcgaccttgctgatacaaatagtggccggcaacgcctatcattgcagcattatctgtgcataatttaggacttgggatagttaattgaatgtcattgactttgcattgatccgctaaagattgacgtaatcctttattactcgccacgccaccagcaacaattaatcgctgaacaccatattctttacaagcttgaatagctttaaacgtgagcacctctacaacactgttttgaaagctcgttgctacgttagcttcaatgattggaatatttttttgtcgttgattgtgaagttgattgattacggcacttttcaacccactaaaactaaaatcataactatctttatccaaccaaacacgagggaatgaataagtatcttcaccttcagcagccaaccgatcaacttgtggaccacctggataatttaaaccaattgttcgtgccactttatcataagcctcacctactgcgtcatctcgtgtttcaccaatgacttcaaatgataaatgatccttcatataaactaattcagtatgtccacctgaaacaataagtgcaattagcgggaatgttaatggctcttctatgtgattagcatatatatgtcctgcaatatgatgaacaggaataagtggcttatcgtaagcaaatgccaatgctttggctgcattaacacctattagtaacgcaccaattagtccagggccttctgtaaccgctatggcatcaatatcttctattgatacatcggcatcccctagagcctcgtttattgttgctgttataccttcaacgtgatgtctacttgccacttcgggaacgacaccgccaaatcgtttatgactttcaatctgacttaaaactgtatttgataaaatatctctgccattttttataacactaacgcttgtttcatcacaacttgtttcaacagctagtattaatatatctttagtcatttaaattcacccacataaccattgcgtcctcaccttcaccataataatttttacgtttaccaccatattgaaatcctaaattttcatatacatgttgtgccactttattattaactcttacttctaaactcatcacatcacaagtgtgacttgcatagtttattccgtattttaaaagcatttgacctaaaccatagcctctataattatcatcgattgcaactgttgtaatttgagcttgatcgataacaatccataaacctaaataaccaataatttgttgttcaaattctaagacaaaatatttcgcaaagttattttgctctatttcatgataaaatgcgtcaattgtccaagaactgtcattgaaactccgacgctcaagatcaaagacttgtggcacatcttctttagtcatctctctaatgtttaattgttcttttgactgttgatccaatttcgttccgcctcagctaatttatggtatttaggagtaaatgtatgtacgtctgaaggtttatctagcaattgatacatgactgatgcatttggtagctgcgcaatcacttcaccttgtaattcatcttgtaattttacagtatctttcccaatataaataaatggttggtttaaatcttctaaaaaagctcgcaatgcctctatcgacatatattgatcttctaaaatagtcactaattgaccattttgccactggaatatgcctgtataaactgcttgtcgtcttgcatcaaacacaggaaccaataatttatcagtatgatcgattgttgctgccaatgcctttaatgatgaaacaccatataatttaacatctaacgcatacgctaatgttttagcaacagtaacaccgatacgtaagccagtatatgaaccaggaccttcagcaacaataatcgcatctaattgctgtttagctattttgctctgctcaaatagctgactaatcgcaggcattaattgcactgaatgattttgtttagaatccgtagttatttcagctaaaacttcatcgttttgcatcaatgctactgataatggttgattcgatgtatcaatgagcagcgaattcatggataattgcctccttaatttgttcataatgttctccttgcgcgaacaactcaatttgtcttgtattttcagatattgttgaaatgttaatagataaatgcgtcgctggaagtaaatcttttataaattgactccattcaataacagtaattgcctgatcttcgaaaaattcatcaaatcctaaatcttcatcagaatcttctaagcgataacaatccatatgatgcaattttaaatttttacccctatatgatttaatgatgttaaatgtcggggaattaatcgtacgtcttacaccaagagcttttcctataaattgcgttaacgttgttttacctgctcctaaatctccgttaagtaaaatcaaatcaccacttttcaattgctcaactaaaaatatagcaaattgattcatttcatctaaattatttatctttatcaatgttgattctcctatattatgcttttcattcataaaaatgattatccattgttcaatcgtatctaactttatatttaacctttatattgtaacaaatttcaacttaaatttcttatctttgaaacagattatctattcaaagttaattgtaagaaaatttaaaatatttgttgacatactaaagcagatatagtaaattaaatttatcaaatttttagacaattctaactattaaagtgatatataccattcacggaaggagtataataaaatgcttaatcaatatactgaacatcaaccgacaacttcaaatattattattttattatactctttaggactcgaacgttagtaaatatttactaaacgctttaagtcctatttctgtttgaatgggacttgtaaacgtcccaataatattgggacgtttttttatgttttatctttcaattacttatttttattactataaaacatgattaatcattaaaatttacgggggaatttactatgcgaagcgacatgatcaaaaaaggagatcaccaagcaccagcaagaagtcttttacatgccacgggcgcgctaaaaagtccaactgatatgaacaaaccatttgtagctatttgtaactcttatattgatattgttcctggacatgttcacttgagagagcttgcagatatagctaaagaagcaattagagaagccggtgccattccatttgaattcaatacaattggtgttgatgatggaatagctatgggacatatcggaatgcgatattctctaccatcacgtgaaattattgcagatgcagctgaaactgtaattaacgctcattggtttgacggcgtattttacattcctaattgtgacaagattacacccggtatgattttagcagccatgaggacaaacgtaccagctatcttttgctctggtggaccaatgaaagctggcttatctgcacatggaaaagcattaacactttcatcaatgtttgaagcagtcggcgcatttaaagaaggatcgatttctaaagaagaatttttagatatggaacaaaatgcctgccctacttgtggttcatgtgctgggatgtttactgcaaattcaatgaactgtttgatggaagttttaggtctagcattaccatacaacggtactgcacttgcagtcagtgatcagcgacgagaaatgattcgccaagcagcttttaaattagttgaaaatattaaaaatgatttaaaaccacgtgatatcgttactcgcgaagcaattgatgatgcatttgcacttgatatggctatgggtggttcaacaaacacggtactgcatacgttagccattgccaatgaagctggtattgattatgacttagagcgcattaatgctattgccaaacgcacgccatatttatcaaaaatagcacctagttcatcgtattcaatgcatgatgtgcatgaagctggtggcgtcccagcaattattaatgaattgatgaagaaagatggcacgttacacccagatagaatcacagttactggcaaaacgttacgtgaaaataacgaaggcaaagaaattaagaactttgatgtcattcaccctcttgatgcaccatatgatgcacaaggcggtttatctatcttatttggtaatatcgcccctaaaggcgcagttattaaagttggcggcgttgatccatctatcaaaacatttactgggaaagcaatttgtttcaattcgcatgatgaagctgttgaagcaatagacaatcgtaccgttcgtgcaggccacgtcgttgtcattagatatgaaggacctaaaggtggaccaggtatgcctgaaatgttagcacctacttcctctattgttggtcgcggcttaggtaaagatgttgcattaattactgatgggcgtttttccggtgccacaagaggtattgcagttggtcatatttcccctgaagctgcatctggtggaccaattgccttaattgaagatggtgatgagattactattgatttaacaaatcgtacattaaacgtaaaccagcctgaagatgttctagcgcgtcgccgagaatctttaacaccatttaaagcgaaagtaaaaacaggttatctagctcgttatactgccctagtaactagcgcaaatacaggtggcgtcatgcaagtccctgagaatttaatttaatttatttttatattggagatggttaaaatgtctaaaactcaacatgaagtaaaccaaaatattgaccctttaaaaatggctgaatcacttgaacctgaacaactaaatgaaaaaactttaaatgatatgcgttcaggatcagaagtgctagtagaagctctacttaaagaaaatgtggattatttattcggttatcctggtggtgccgtactacctttatatgacacgttttatgatggtaaaatcaaacatattttagcaagacacgaacaaggtgctgttcatgctgcagaaggttatgcacgtgtatctggtaaaactggcgtcgttgtagttacaagcggtccaggtgcaactaatgtaatgacaggtattacggatgcacattgcgactctttacctctagttgtattcactggacaagttgctacaccaggcattggtaaagatgcattccaagaagcggatattctatctatgacttcaccaattacaaaacaaaattatcaagtgaaacgtgttgaagatatccctaaaatcgtacacgaagctttccatgtagctaattctggacgcaaaggtcctgtagtgattgattttccaaaagatatgggtgttttagctacaaatgtggatttatgcgacgaaatcaatattccaggttatgaagttgttacagaaccagaaaataaagacattgacactttcatctcacttttaaaagaagcgaaaaagcctgtcgtattagccggcgcaggtattaatcaatcaaaatcaaatcaattattaacacagtttgttaataaacatcaaatcccaacagttactactttactaggtctaggtgctgtaccttatgaggatacactatttttaggtatgggaggaatgcatggttcttatgctagtaacatggcattaactgagtgtgatttactcattaatttaggtagccgcttcgatgatagattagcaagcaaacctgatgcctttgcacctaacgccaaaattgtacatgtagatattgatccttcagaaatcaataaagttattcatgtagatttaggtattattgcagactgtaaaagatttttagaatgtttaaatgataaaaatgttgagactatagaacacagtgactgggttaaacattgtcaaaataataagcagaaacacccatttaaacttggtgaagaagatcaagtattttgtaagccacaacaaacaatcgaatatatcggcaaaattacaaatggtgaagcaattgttactacagacgtgggacaacatcaaatgtgggcagctcaattttatccatttaaaaatcacggacaatgggttacaagcggtggtttaggaacaatgggattcggtattccttcgtcaattggtgccaaattagctaatcctgataaaacagtcgtatgtttcgtcggtgacggtggtttccaaatgacaaaccaagaaatggcacttttacccgaatatggtttagatgtcaaaatcgtactaatcaataatggaacattaggtatggttaaacaatggcaagataagttctttaatcaacgcttctcacactcagtatttaatggtcaacctgattttatgaaaatggcagaagcatatggcgtcaaaggtttcttaatcgataagccagaacaactggaagaacaattagatgcagcgtttgcttatcaaggaccagctttaattgaggttcgtatttcccctactgaagctgtaaccccaatggttccgagtggcaaatcaaatcatgaaatggagggcttataatgacaagaattcttaaattacaagttgcggatcaagtcagcacgctaaatcgaattacaagtgcttttgttcgcctacaatataatatcgatacattacatgttacacattctgaacaacctgggatttctaacatggaaattcaagtcgatattcaagatgatacatcacttcatatattaattaaaaaattaaaacaacaaattaatgttttaacggttgaatgctacgaccttgttgataacgaagcttaattttaagacaaaggcaatgatgcgctaattagttatagatatatcataggctgctagttaacatctgccactattacaaagttatatttcagaattttcgaaacacaaaatatttaattatttggaggaatttattatgacaacagtttattatgatcaagatgtaaaaacggacgctttacaaggcaaaaaaattgcagtagtaggttatggatcacaaggtcacgcgcatgcacaaaacttaaaagacaatggatatgatgtagtcatcggcattcgcccaggtcgttcttttgacaaagctaaagaagatggatttgatgtgttccctgttgcagaagcagttaagcaagctgatgtaattatggtgctattacctgatgaaattcaaggtgatgtatacaaaaacgaaattgaaccaaatttagaaaaacataatgcgcttgcatttgctcatggctttaacattcattttggtgttattcaaccaccagctgatgttgatgtatttttagtagctcctaaaggaccgggtcatttagttagacgtacatttgttgaaggttctgctgtaccatcactatttggtattcaacaaggcgcttcaggtcaagcacgtaatattgctttaagttatgcaaaaggtattggtgcaactcgtgcaggtgttattgaaacaacatttaaagaagaaactgagacagatttatttggtgaacaagcagtactttgcggtggtgtatcgaaattaattcaaagtggctttgaaacattagtagaagcgggttatcaaccagaattagcttattttgaagtattacatgaaatgaaattaatcgttgatttgatgtatgaaggcggtatggaaaatgtacgttactcaatttcaaatactgctgaatttggtgactatgtttcaggaccacgtgttatcacaccagatgttaaagaaaatatgaaagctgtattaactgatatccaaaatggtaacttcagtaatcgctttatcgaagacaataaaaatggattcaaagaattttataaattacgcgaagaacaacatggtcatcaaattgaaaaagttggtcgtgaattacgcgaaatgatgccttttattaaatctaaaagcattgaaaaataagatagacctacaatgaggagttgttaaatatgagtagtcatattcaaatttttgatacgacactaagagacggtgaacaaacaccaggagtgaattttacttttgatgaacgcttgcgtattgcattgcaattagaaaaatggggtgtagatgttattgaagctggatttcctgcttcaagtacaggtagctttaaatctgttcaagcaattgcacaaacattaacaacaacggctgtatgtggtttagctagatgtaaaaaatctgacatcgatgctgtatatgaagcaacaaaagatgcagcgaagccggtcgtgcatgtttttatagcaacatcacctattcatcttgaacataaacttaaaatgtctcaagaagacgttttagcatctattaaagaacatgtcacatacgcgaaacaattatttgacgttgttcaattttcacctgaagatgcaacgcgtactgaattaccattcttagtgaaatgtgtacaaactgccgttgacgctggagctacagttattaatattcctgatacagtcggctacagttaccatgatgaatatgcacatattttcaaaaccttaacagaatctgtaacatcttcaaatgaaattatttatagtgctcattgccatgacgatttaggaatggctgtttcaaatagtttagctgcaattgaaggcggtgcgagacgaattgaaggcactgtaaatggtattggtgaacgagcaggtaatgcagcacttgaagaagtcgcgcttgcactatacgttcgaaatgatcattatggtgctcaaactgctcttaatctcgaagaaactaaaaaaacatcggatttaatttcaagatatgcaggtattcgagtgcctagaaataaagcaattgttggccaaaatgcatttagtcatgaatcaggtattcaccaagatggcgtattaaaacatcgtgaaacatatgaaattatgacacctcaacttgttggtgtaagcacgactgaacttccattaggaaaattatctggtaaacacgccttctcagagaagttaaaagcattaggttatgacattgataaagaagcgcaaatagatttatttaaacaattcaaggccattgcggacaaaaagaaatctgtttcagatagagatattcatgcgattattcaaggttctgagcatgagcatcaagcactttataaattggaaacactgcaactacaatatgtctctagcggccttcaaagtgctgttgttgttgttaaagataaagagggtcatatttaccaggattcaagtattggtactggttcaatcgtagcaatttacaatgcagttgatcgtattttccagaaagaaacagaattaattgattatcgtattaattctgtcactgaaggtactgatgcccaagcagaagtacatgtaaatttattgattgaaggtaagactgtcaatggctttggtattgatcatgatattttacaagcctcttgtaaagcatacgtagaagcacatgctaaatttgcagctgaaaatgttgagaaggtaggtaattaattatgacttataacattgttgccctacctggtgatggaatcggtccagaaattttgaacggatctctatcattgcttgaaattataagtaataaatataactttaattatcaaatagagcaccacgaatttggtggtgcctctattgatacattcggcgagcctttaactgagaaaaccttaaatgcgtgtaaaagagcagatgctattttactgggtgcaatcggtggacctaaatggacagatcctaacaatcgaccagaacaaggattattaaaattgcgtaaatccttaaatttatttgtaaatatacgccccactaccgttgtcaaaggcgctagttctttatcacctttaaaggaagaacgcgttgaaggcacagatttagttatagtccgtgaattgacaagtggtatttattttggagaacctagacattttaataatcacgaggccttagattctcttacttatacaagagaagaaatagaacgcattgttcacgtagcatttaaattggccgcttcaagacgaggaaaactaacatcagttgataaagaaaatgtattagcttctagtaaattgtggcgcaaagtcgtaaatgaagtaagtcaattatatccagaagtaacagtaaatcacttatttgttgatgcttgtagtatgcatttaatcacaaatccaaaacaatttgacgtcatcgtatgtgaaaacttatttggcgatattttaagtgatgaagcttcagtgattcctggttcacttggtttatcaccttctgctagttttagtaacgatggtccaagattgtatgagcctattcatggatcagcaccagatattgcaggtaaaaacgttgccaatccatttggaatgattctatctttagcgatgtgtttacgtgaaagcttaaatcaaccagatgctgcagatgaattagaacaacatatttatagcatgattgaacatgggcaaacgacagcagatttaggcggcaaattgaatactactgatattttcgaaattctatctcaaaaattgaatcactaagggggagatgtaaatgggtcaaacattatttgacaaggtgtggaacagacatgtgttatacgggaaattgggcgaaccgcaactattatacattgatttacaccttatacatgaagttacttctcctcaagcatttgaaggacttaggcttcaaaacagaaaattaagacgcccagatttaacatttgcaacactcgatcacaatgttcctactattgatatattcaatattaaagatgaaattgcaaacaaacaaatcacaacattacaaaaaaacgccatagattttggggtgcatatttttgatatgggttctgatgaacaaggtattgttcacatggtaggacctgagacaggacttacacagcctggcaagacaatcgtttgtggtgactctcacacagcaacacatggagcatttggtgctattgcatttggaattggaacaagtgaagttgaacatgttttcgcaactcaaacgctatggcaaacaaaacccaaaaacttaaaaatcgatattaatggtaccttaccaacaggcgtctatgctaaggacattattctgcatttaattaaaacgtatggtgttgactttggtacaggctatgctttggaatttactggcgaaacaattaaaaacctttcaatggatggtcgaatgactatttgtaacatggctatcgaaggtggtgccaaatacggcataatccaacctgatgatataacatttgaatatgttaaagggagaccatttgccgataacttcgctaaatcagttgataagtggcgtgagctatattctgatgacgacgcgatatttgatcgtgtaattgaacttgatgtttcaacattagaaccacaagtgacatggggaactaatcctgaaatgggtgttaatttcagtgaaccattccctgaaatcaatgatatcaacgatcaacgtgcgtatgattatatggggttagaaccaggtcaaaaagctgaagacatcgacttagggtatgtttttctcggttcatgtacaaatgctagactatcagatttgattgaagctagtcatattgttaaaggaaataaagttcatccaaatattacagctattgtcgtaccaggttctcgtacagtaaaaaaagaagcagaaaaattaggtctagatactatctttaaaaatgcaggatttgaatggcgtgaaccaggatgttcaatgtgtttaggcatgaatcctgaccaagtacctgagggcgtacattgtgcatctacaagtaatcgaaactttgaaggacgacaaggcaaaggtgcaagaacacatttagtatcccctgctatggcagcagcagcagctattcatggtaaatttgtggacgtaagaaaggtggttgtttaaatggcagcaatcaaacctattacaacatataaaggtaaaatagtccctctcttcaacgacaatatcgatacagaccaaatcattcctaaggtacacttaaagcgtatttcaaaaagtggctttggtccatttgcttttgatgaatggcggtacttacctgatggttcagataatcctgatttcaatcctaacaaaccacaatataaaggggcttctattttaattactggagataattttggatgtggttcaagtcgtgaacatgctgcttgggctcttaaggactatggttttcatattattattgcaggaagtttcagtgacatattttatatgaattgcactaaaaatgcgatgttgcctatcgttttagaaaaaagtgcccgtgaacatcttgcacaatatgttgaaattgaggtcgatttaccaaatcaaactgtgtcatcaccagacaagcgtttccattttgaaattgatgaaacttggaagaataaacttgtaaatggcttagatgacattgcaatcaccctacaatatgaatcattaatagaaaaatatgaaaaatcactttaagggagttgaatattatgacagtcaaaacaacagtttctacgaaagatatcgatgaggcatttttaagacttaaagatattgtcaaagaaacacctttacaattagaccattacttatctcaaaagtatgattgtaaagtctatttaaaacgagaagatttacaatgggtacgttcttttaaattaagaggtgcttacaacgctatttctgttttatcagatgaagctaaaagtaaaggtattacatgtgcaagtgcaggtaatcatgctcaaggtgttgcctatacagctaaaaaacttaatttaaacgctgttatctttatgccagtcactacacctttacaaaaggtaaatcaagtaaagttctttggaaatagtaacgttgaagttgtactcactggtgatacatttgatcactgtttagctgaagctttaacttatacaagtgaacatcaaatgaactttatagatccattcaataatgttcatacaatttctggacaaggtacgcttgctaaagaaatgctagaacaagcaaagtctgacaatgttaactttgattatctatttgccgcaattggtggtggcggtttaatttcaggtattagtacttactttaaaacctattcacctaccacgaaaattataggtgttgaaccttcaggtgcaagtagtatgtatgaatctgttgtggtaaataatcaggtagtcacattgcctaatatcgataaatttgtggacggtgcatctgtagctagagttggcgatattacatttgaaattgcaaaagaaaatgtagatgattacgttcaagtagatgaaggtgcagtttgttctacgattttagatatgtattcaaaacaagcaattgtagcagaacctgctggcgcattaagtgtaagtgcgcttgaaaactataaagatcatattaaaggtaaaacagtggtttgtgtcattagtggtggtaataatgatattaatcgaatgaaagaaattgaagaacgttcattactatacgaagaaatgaagcattactttatcttaaatttccctcaacgtccaggtgcattgagagaatttgtaaatgacgtattaggacctcaagacgatattactaaatttgaatacttaaaaaaatcttctcaaaatacaggtactgtcattattggtattcaacttaaagatcatgatgatttaatacaactcaaacaacgtgtaaatcatttcgatccttccaatatttatattaatgaaaataagatgttatattcattgttaatttaacacatagtaagaaaaacagtcataaattgatttctaattgaaatcatcttatgactgctttttattatactttacatttctcgtttcgtcagattcaaacgttttcacttcgccaagccatctttctttgtgtttgcttttattttgacgttttagacataaaaaaagagaccttgcggtctcaatgcggctcatcgcatccactttttgcctggcaacgttctactctagcggaacgtaagttcgactaccatcgacgctaaggagcttaacttctgtgttcggcatgggaacaggtgtgacctccttgctatagtcaccagacatatgaatgtaaattatacattcaaaactagatagtaagtaaaagtgattttgcttcgcaaaacatttattttgattaagtcttcgatcgattagtattcgtcagctccacatgtcaccatgcttccacctcgaacctattaacctcatcatctttgagggatcttataaccgaagttgggaaatctcatcttgaggggggcttcatgcttagatgctttcagcacttatcccgtccacacatagctacccagctatgccgttggcacgacaactggtacaccagaggtatgtccatcccggtcctctcgtactaaggacagctcctctcaaatttcctacgcccacgacggatagggaccgaactgtctcacgacgttctgaacccagctcgcgtaccgctttaatgggcgaacagcccaacccttgggaccgactacagccccaggatgcgatgagccgacatcgaggtgccaaacctccccgtcgatgtgaactcttgggggagataagcctgttatccccggggtagcttttatccgttgagcgatggcccttccatgcggaaccaccggatcactaagtccgtctttcgaccctgctcgacttgtaggtctcgcagtcaagctcccttatgcctttacactctatgaatgatttccaaccattctgagggaacctttgagcgcctccgttaccttttaggaggcgaccgccccagtcaaactgcccgcctgacactgtctcccaccacgataagtggtgcgggttagaaagccaacacagctagggtagtatcccaccagcgcctccacgtaagctagcgctcacgtttcaaaggctcctacctatcctgtacaagctgtgccgaatttcaatatcaggctacagtaaagctccacggggtctttccgtcctgtcgcgggtaacctgcatcttcacaggtactatgatttcaccgagtctctcgttgagacagtgcccaaatcgttacgcctttcgtgcgggtcggaacttacccgacaaggaatttcgctaccttaggaccgttatagttacggccgccgtttactggggcttcgattcgtagcttcgcagaagctaaccactcctcttaaccttccagcaccgggcaggcgtcagcccctatacatcaccttacggtttagcagagacctgtgtttttgataaacagtcgcttgggcctattcactgcggctcttctgggcgttaaccctaaagagcaccccttctcccgaagttacggggtcattttgccgagttccttaacgagagttcgctcgctcaccttagaattctcatcttgactacctgtgtcggtttgcggtacgggcacctattttctatctagaggcttttctcggcagtgtgaaatcaacgactcgaagacacaatgtcttctccccatcacagctcagccttaacgagtaccggatttgcctaatactcagccttactgcttagacgtgcaatccaatcgcacgcttcgcctatcctactgcgtccccccatcgattaaaacgattataggtggtacaggaatatcaacctgttatccatcgcctacgcctgtcggcctcagcttaggacccgactaacccagagcggacgagccttcctctggaaaccttagtcaatcggtggacgggattctcacccgtctttcgctactcacaccggcattctcacttctaagcgctccacatgtccttacgatcatgcttcaacgcccttagaacgctctcctaccattgtccaaaggacaatccacagcttcggtaatatgtttagccccggtacattttcggcgcagtgtcactcgactagtgagctattacgcactctttaaatgatggctgcttctaagccaacatcctagttgtctgggcaacgccacatccttttccacttaacatatattttgggaccttagctggtggtctgggctgtttccctttcgaacacggaccttatcacccatgttctgactcccaagttaaattaattggcattcggagtttgtctgaattcggtaacccgagaggggcccctcgtccaaacagtgctctacctccaataatcatcacttgaggctagccctaaagctatttcggagagaaccagctatctccaggttcgattggaatttctccgctaccctcagttcatccgctcacttttcaacgtaagtcggttcggtcctccattcagtgttacctgaacttcaacctgaccaagggtagatcacctggtttcgggtctacgaccaaatactaaacgccctattcagactcgctttcgctacggctccacatttactgcttaaccttgcatcaaatcgtaactcgccggttcattctacaaaaggcacgccatcacccattaacgggctctgactacttgtaagcacacggtttcaggttctatttcactccccttccggggtgcttttcacctttccctcacggtactggttcactatcggtcactagagagtatttagccttaggagatggtcctcccagattccgacggaatttcacgtgctccgtcgtactcaggatccactcaagagagacaacattttcgactacaggattattaccttctttgattcatctttccagatgattcgtctaatgtcgtcctttgtaactccgtatagagtgtcctacaaccccaacaagcaagcttgttggtttgggctcttcccgtttcgctcgccgctactaagggaatcgaattttctttctcttcctccgggtactaagatgtttcagttctccgggtgtgccttctgatatgctatgtattcacatatcgataacatgacataactcatgctgggtttccccattcggaaatctctggatcaaagcttacttacagctccccaaagcatatcgtcgttagtaacgtccttcatcggcttctagtgccaaggcatccaccgtgcgcccttaataacttaatctatgtttccaccatttttataagtcaaacgctcacatacggcttcgttttcattattttaaatgctcatttacataagtaaactctgctttaaaataatttaactcattgtctgctaaacgttttcttttataaaaagatttaaacgcgttattaatcttgtgagtgttctttcgaacactagcgattatttcttatgaattcaagcttatttaaaactctttattcactcggttttgcttggtaaaatctatattttacttacttatctagttttcaatgtacaatttctttttagtcaagcgctcgcatactgctttattttcaaaaaatcaaatgctcatttacaaaagtaaactccgctttaatttttcttaatgcattgtctaacaaccgctttctttaaaaagaatagattgtcaagcgctcgcataagcaatatcactttaaccaaaaaatatttgaatgttaaataaacattcaaaactgaatacaatatgtcacgttattccgcatcttctgaagaagatgttccgaatatatccttagaaaggaggtgatccagccgcaccttccgatacggctaccttgttacgacttcaccccaatcatttgtcccaccttcgacggctagctcctaaaaggttactccaccggcttcgggtgttacaaactctcgtggtgtgacgggcggtgtgtacaagacccgggaacgtattcaccgtagcatgctgatctacgattactagcgattccagcttcatgtagtcgagttgcagactacaatccgaactgagaacaactttatgggatttgcttgacctcgcggtttcgctgccctttgtattgtccattgtagcacgtgtgtagcccaaatcataaggggcatgatgatttgacgtcatccccaccttcctccggtttgtcaccggcagtcaacttagagtgcccaacttaatgatggcaactaagcttaagggttgcgctcgttgcgggacttaacccaacatctcacgacacgagctgacgacaaccatgcaccacctgtcactttgtcccccgaaggggaaggctctatctctagagttgtcaaaggatgtcaagatttggtaaggttcttcgcgttgcttcgaattaaaccacatgctccaccgcttgtgcgggtccccgtcaattcctttgagtttcaaccttgcggtcgtactccccaggcggagtgcttaatgcgttagctgcagcactaaggggcggaaaccccctaacacttagcactcatcgtttacggcgtggactaccagggtatctaatcctgtttgatccccacgctttcgcacatcagcgtcagttacagaccagaaagtcgccttcgccactggtgttcctccatatctctgcgcatttcaccgctacacatggaattccactttcctcttctgcactcaagttttccagtttccaatgaccctccacggttgagccgtgggctttcacatcagacttaaaaaaccgcctacgcgcgctttacgcccaataattccggataacgcttgccacctacgtattaccgcggctgctggcacgtagttagccgtggctttctgattaggtaccgtcaagatgtgcacagttacttacacatatgttcttccctaataacagagttttacgatccgaagaccttcatcactcacgcggcgttgctccgtcaggctttcgcccattgcggaagattccctactgctgcctcccgtaggagtctggaccgtgtctcagttccagtgtggccgatcaccctctcaggtcggctatgcatcgttgccttggtaagccgttaccttaccaactagctaatgcagcgcggatccatctataagtgacagcaagaccgtctttcacttttgaaccatgcggttcaaaatatcatccggtattagctccggtttcccgaagttatcccagtcttataggtaggttatccacgtgttactcacccgtccgccgctaacatcagagaagcaagcttctcgtccgttcgctcgacttgcatgtattaggcacgccgccagcgttcatcctgagccaggatcaaactctccataaaaattatgatgtttgattagctcataaatactaaataatgtttgtaacttatagttacgtttttggaattaacgttgacatattgtcattcagttttcaatgttcattaaaattatctatggagcgggtgatgggaatcgaacccacaacatcagcttggaaggctgaggttttgccattaaactacacccgcttatttaaattaagaattttgatgcggccgagaggacttgaacctccacgggatttctcccactaggccctcaacctagcgcgtctgccattccgccacgaccgcggatataggcatttaaaacatcttcgtttttcagaacgttatttattatattatgtttaaaaatatttgtcaataacttttaatcgtttttttacattaaattaatttgtgttatcagttgttaacacaacgctatttataataaaacatttagaacttattgtcaacatattttataaattaaatttagaattgactgtctttcaaatcaaagtttatttaatttgttcttttttaaggaacgtgtttaatcatactaactataagctgtacagtcaatagaaaagttcaatcaaaatgtcatgaaaaatgtataattatcttttgtgctactttaaagctttaattgggtaaagtttatatattaattattactaaaatacgccaagatttttaatctaatcattttaatttcatcctatcaagccacaatttatgccattacctatatcataagtagaaaagccgagattgcgaagtattaaattacgacaatctcggctttaaacattttataaacacaatttcttcttattcaattactatgtttaccaatcaaaataactcactgataaattctatataaattccatacaactcataaataatcttacatatacacgaattagctctatttgtattgtacttatttcaattgtcttttcattcttaattttccattgcaatgtccgcaacgcatacgattcgtatcaactttacggatacgtatatattttgcatgacatttagtgcaataatattcataatttgcccgttgttgatagctttcaatgctgttacaaaatctaggcgctccaacctgttggctcaatcgtttaaaatcttgatctttatgttgataacctttaccagcaatatgcaagtgataatgacacaattcgtgcagtataatttttacaacagcatcttctccataatgctcatattgttttggattaatttcaatatcatgggactttaaaagataacgtccgcctgttgtacgtaaccttttattaaaatatgcacaatgtcgaaacgtacgtccaaatttttcttccgaaagattctcaaccattcgctgaagtttgtcattattcatgtggatcaatcatcgttaatgatactttgtctttatttttgtcaatactgtaaatccaaacgtcaacgatatcaccaacactgacaatatccattggattttttacgaacttcttagaaagtttcgaaacatggacaagtccatcttgtttaacacctatatctacaaatgctccaaaatctactacatttctaactgtaccactcaatttcattccttcttgtaaatcttcaattgatagcacatcggatttaaggattggtgtttcaaactcgtcccttggatctcgattaggtgctttcaaggatttaataatatcctctaatgtaggtacaccgacttgtaattcaatcgccagttcatccatatccaatgaatttaatttagcttttaatgcatcactacctaaatcattgccaccaaatccgagtttatctaataactgatacgttactttatagctttcgggatgaatcgatgtattatccaatggctctgaaccgtctactattcttaaaaatcctatactctgctcaaaagttttagcacccaaacgcttaatcttgcttaactctttattatgctttattgcgccattttcttctctatatgcaattatatttttagcaatttgcgaacttagaccagacacatattgtaataatgatgatgatgctgtattgacatcaacacctacttggttaactgctgtttcaacaacgaaagttaatgcattttctagtgctttttgattaacatcatgctggtattgtccgacaccaatagatttaggatcgattttaactaattcacttaatggatcttgaacgcgtcgtccaattgatacggcacttctttcttccacttgaaaatcaggaaattcatctctagcaatttctgatgctgagtatactgaagcgcccgcttcattgacaatgatgaattgtactggcaactgatgctttttaattaaatctgcaacaaattgttctgtttcacgacttgcagtaccattgccaattgcaattaattgcacatcatacgctttaaccatttgtacaaaatccttctctgctgcctcttttttagaaactggtggatgcggataaatcacaccttttgctataaaagtaccgaatgggttaatgactgctaatttacaacctgttctaaatgctggatctacgcctaatatttgtttacctttcattggaggttgcagtaatagatttcttaagttttcactaaaaacatctattgcatgattttcagctttttcagttaaatcagcatggatttcacgctctatcgaagggacaattaagcgtttcaagctatctttaatcgcctctaaaatataactgcgatttacattattatgattgatttcttgacgtgcaatgaaatcctctactgatgtcgtatcgaattcaaactttacagataatactttctctttttcaccacgattaacagctaaaactctatgattagcaatgcgtttaattggctcactatatgcatagtacatttcaaaaatacctttttcatcttcagcatttttctttttagatgtagttaacacaccttgatgatacatatcttttaaaatttttgttctatatttaggattatctgaaatttgttccgcaataatatcttgtgcacctttgatagcatcttcaaccgattgcacttcttcatttataaattgttgtgctttttcttcaattgagacttcatgtttacgtgccttcatccatatcgctaatggctctaaccctttacgtttcgcctcagttgcccttgtctttttcttttgtttaaaaggcctatataggtcttcaacacgttgtaatttgttctgttttaaaatatccttctttaattcctcagtaagtaatccttgctgttctatatttttgataacttcttctttacgtttttgtaaattgaccatatattggtattcgtcatcaatttgctttatttgaacttcatctagtccaccagtttgctcttttcgatacctcgcaataaatggtactgtatttttttcttctagcagtgttaatactgcttcaatttgttttttactaaattgatatttctctatgattgaattaatcaattgattgtccatttacttaacccacactttttcttaaatttactcatttattttaacatattctaaaatacttctattaagatatgatacttaatgtaattttcacttccaaaacatttaaaacgaatgattaggtcatactatattttaaaacgcactaagattattgaaaatgacacaccatcatttctaaatttcataatctaagactactttttttattctaatagcaacccacctatttaaaacgacaattagatatcttcttcacttaaattattaatactatatcgcgacatttatgtggatacacattaaactacactaataatgtattaattcgaaaatcttaattaaattaaaaatacccctcgatttcaatttaataatcaagggataattatatggatttttcattataaaacgtatcattaataaacaaattctattgatgtgctgcttcttgtaatttcttaattgccgttctctgaagtcgtgatacatgcatttgacttaaaccgatacgctcacctgtctctttttgactcaatccttcaataaacgtacattgtatgatttctcgttcgcgatcagataatataggtaatattttttctaaaatcatacgtttttcagttaagtcataatggtcatcttgttgccccataatatctaatagcgtaacagttgaaccatctttatcagcttcaatggaatgatcaacacttaacgcattataactttgtcccatttccattgcttctaacacttcttcttctgagacttctaatcgatcagctatttcactgatagaaggtgaacgctctaattcagcggttagttcatcgctcacttttttgattcttggcccaatttctttaatacgtctcggaacatgtacactccaagttttatctcgtagatatcttttgatttcaccgattacagtaggtactaaaaaggcttcaaacttccgttcaaaggacatatcgaatctatttatggcacctattaaaccaaccataccaacttgaactaaatcttcgtgatgtgattgtcctttagaatatttatatgccaatgactcaattagtttttggtaatgtttaactaacttatcctgtgcatctgtattcttattttcttggtgttctttaatccattggttaatttgctcaggtgaaatttcattagctgatttcgactctttcgccattatttcgcacctgctctttttttatatacttagtcatactgattgtcacaccagattctttatatactgtgacttcatccattaaagattcgattaaaaataaacctaggccaccttcgcgtaaaaagtctatattttcgtctttatcgtaaggacctatttttgatttagttgtttcataatcaaaactgtcacctttatcagaaataacaattttaattttatcttctaaaatttcaaaatatatgttaataatgcccacattgttattttctttgtatgcatgtttaactgcatttgtcacagcttcactaactgcaatcttggcatcttcaatatcatcatatgtagcaccagctctcgaaaaaacgccagaaagtgttaaacgaattaaacttacatactctgccgatgctggcacgcgcatttcgataaaatcttctttagattgcatgttattcgacctccgttccttcattaacatgcattaaatccttaagaccagtaatttcaaatagtctaccgatacgatctgacacacctaaaatgtatagttctttatcattttggtttaatgcttttaatgtacctacgaataaacctaaacctgtcgaatccatataactcacattttctaaattaacataaatatcacgagttccatcttgtctcataggtgttaaaacctcttctaattcaggcacagtataaacatctaattctccaccgactttaacttcgtaaaatttatcttgagtggttgtttctatattaagattcatttcattacactcctacttattaaaaatatttatcttcattttaagcgctgtatccaccatatttatatttcaaattattatatacccatcgaaataatttctaatcttcttttttaaattaatttactctttttataatcaaaatagtcatatcatcttttttatttgggttttgaagctttaaaattgcttcatagataatttgaacaatatcttgtgggtgcatatgtttatgttttttaatatattctaaaagtttttgtttatctataaaggtaccttcactatttctagcttcagtcacaccatccgttaaaatgataattaaatcatcaaggtatattggaatttcttgttgttgatatcgtgtttgtgaactgattcctaacactctacctctaactgaaatttcttcaaattcttctttttcagcgcgataaatatatccaggctcatgaccagctgaactacaatacaataaatggttcatttcttcatataaaccataaaacattgtgacgaacatattttgattaatattcttttcaacaacacgatttaaacgttttaaaccatcactcggtaattgtgagtgtccataagaatccatgccaaactttatcatactcattgctaaagcagctggtataccttttccaatgacatctgcaacagcaaagctcattgtgccatcgttatggtcaattaaattaaaataatctccacttactttttgtgccgccactgaaataacgccaatttgaatactatcaaattgtggaatatctgttttaagcattgtttgttgtaagctagaagctaagtctatctctttatcgtgaacttgaagtttatctaccaatctttgataatctcgataactataaccaaatttcttgtaagacatctaatgtcttgaacacatcttcacgcgttaagtttaacgtcaatatatagtttttgtgaatatcgacaatgtcttcaggcaagacgtccttacgaatcacttcgtcagtgtatttctcacacttttttatcaattctactttatcttggcacgttaaactttcatcaattaaacccttataatgttgcttaaattcttccacgattagttgcctcctcacttcccttacaaagcaaatgcttaagcaaggataattatgattcacttactaacatttatttaattgcacttatcaattttgtcgtttgcaattttgctgtagatgatacttttaagctaaaaaaactttaggatggaatacctaaagcctaaaaaacttaagacatccttttataataaaaaatatgaatatcataactggtatttgctaaaatctttgtttataagaaaattcttcgtacagaatttagaaatagttataattattataaagttattgtcttttatatcaatattttatttatctctgaaaaatacatataatagacgcctaatttttctggtgagctactgcattcagccctaaactaatcattagtgcattatctacttctttcattttatcatcggataagtacgtcagtttttctttcaatcgttttttatcaagtgtacgaatttgttctaataatataactgagtctttatccaacttatactttttcttttcaatctctacatgtgtcggtattttcgctttattaatcctaccagttattgccgcaacaataactgtaggactatatttattaccagtatcattttgaattatgactacaggtctgactcccccttgttcagatccctgtactggtgataaatctgctaaataaacatctcctcgtctaatcattcattcgttgaattagaagataaatatgtttcgttgcaatcgcatgcttcacactctatcggaaaagcttcgttcgctagggagagatttaaatcagccatttgtgaatatccttcttttaaagattgttctaagctatgacttctattttgactaaaagataacatatgagaacctccaattgattccaaaagttattaaatgacctttaattactctaatgataacaaattttatatgcactgaccatattattttaacaattcatttgttacaaaacgttgatcaccatcatgatagattcgcggcaaacgtctcgacaagttacaaagcacttcataattaatagtatgttgcttttcagctaccacctctaccgactgtggactttctctatgattatctattaaaatcaccgaatctccagctttaacttgatctggcactttaacaattgtctgatccatacatacgcgaccaataacttcgcattgatgaccatttacatttacaaagctaccttgcattatgcgtaaatagccatctgcatatccaataggtaacaatgctattgtagttgggtcagtagctgtataagttgcaccataacttacagactcacccgcttgtagcgtctttgtttgaactacattagcaattaattgcacacttggtttaaggtgtactttaactttttgctgtacatactctgatggataatatccataaagggaaattcctggtcttattgcattacagaattggcaatccattaatagagagcctgctgagttctgacaatgtatatattcaggtttaattgcttcattgaccatatctttaaaacgttgatattgttcagttgtcatatctcctggttcgtcagcacaggcaaagtgtgtaaacacgccttcaaatacaagttgctcatattgttgaatgatttcaatcacttcttgatacgttttagtatctttaatacctaaacgtcccattcctgtatctaatttaatgtgcaaccataactttttctcttgctcaccagaaatgtttttaattgcttctttcaaccactgtttagacggaaccgttaaggcaactcggtgttgtatcgctttatcaatatctttagctggtaacacacctaagactaaaattttagcagtaatcccatgcattctaagttctatcgcttcatctaacgttgctacagcaaaaaatgtggcgccattttccattaaatgacgtgctactttaacactacctagtccataggcattggctttaacgacagccatcactgttttatttggatgcaatgtactgaatactttgaaatttgatgcaacagcgtttaaatctacattcatatacgcagatctataatatttatccgacatattacttcctcctgtaattcccacacgttttaaaactagatcttaattatcattgtataacaaatttaaaatgctgacttttctaaaacaacttggctcatcgcataatgctcagtgtgtgagatactaacatgtacgataaacccttcgtaatcaatctttggtttgccaagttcgtcgttgtaacagtctatatcgttaaaagctacatgttttcctaagcctgtgcctaatgctttactgaacgcttcttttgtagcaaacctgccagctaaaaattcaattttacgttgctcatgtgtgaaattgttgaatttgtgctgttcatttttagttaaaatccgctcaaccaattttggttgcttactatataacgcttgtattcgatcgatttcgattaaatctacaccaattccatgtatcattgattattcctcatttttattgttttctaaatgtctctcgttatttaaccatcgtttcaatctacgtgcttcacttctatctattaattcaatttcagcttgaccacccgctgtataaagggtcaaagttgctaatcgatagcgtctcattataggaccaacatcgatatcaatattttgaatacgaaaatatggtattaccttttcatccaaaaataaaatgccgtttcgtacacgcaaatggtgtttttcaaatgcatatctgcagtgcttatatcgatagactggcgctataacaagcgtgaaaacagcaacaagtaatattataatcacactactaacaatggataaatggttatctaaaatctcccaaaatagccagttcaaaatattaaatgcgattaaaagtacaagcgctatgggtatccaaaacagcacagcacttaacctcatcacttttttagcgtgtggtgacataaaattataatccctcatcattttcacctcttaaataccatgatttcaatttatttgcatcttcacttcttgcgtattttaagttaatcgattgggctcccacacctttagcaacaataaagctaaaattatttaaattgttgcgtttaagtaatgtatgttgccaagtgtcaaatcctataatgtgatgcgctttaaaataataaatatttcgtttcaatagctcgaaattctggatagtaatttgttcttctgtcattttaaaacccgcatgtttgacataaagatatcctttgatcacaaataaaccaataatgactattgttataatcgtaaataacaataataattgattccaaaaataacagcctatacctgccatagctatgacaataatactaggtattaaaaagtgtctgtggaaacctgacaaaggcataccttcattaacttgttgataagataaatctggtactaaattctggataatttgatatgctttgtctcgtttaataaacggcaatatcggcacactacctgaatcattgtcatcatcttcgatttttttattttcaaaatcacttgtgatgataaaatgtattgctgtgtagccaaataatcttcgtatatatgactgacgttcaacaacagcttgcaatcgtttcgttggtacagttactttcttcttgttaaagagaccatattcaattttaagttgctcattttcaagcatcaccgaaaagccataaaatcttatcattgttataatcgttccaataatatatgccactattaatactagtaaaatgatgattaatactgaaatacttacaatttgaacccattgactaatttcatgatttagcttcgaccatgggatcaactctcttacagccccgtaaatcggtactaaagctgctaacgttacaccaatggcgccactggtcattgccataaatagtgattctttaaaattcatctgatatataggaatgcgtttatttttctgattaagcatactatcagtgttctgcacttcatctaagcgaccttctgcgatgtcttccacattaccttcaatgtcatgattacagttgtcattcttctcagcactagacttttgcgccacttctgtcttcaactctgtttgcaattgatcaatatatcgttcaagatattcaccttgttttttcgaaataacacttaagacaataccatcacttggtgttttgatttgtaaatccacaccaccaataatttgattgacgaccccttgtgtcatatcaacggactgaatacgttttatatttaattctttacgctttttattaaaaatacctgttgttaaaatgaaataattatcctcaatccaatatcgcgtgttcataattccgacaatttgagaaatgtatgatattaaaaagaatacaaatacaatacctatccataaatatgattcgggattcgtataatcaaaatctttcaattgaaagataatgaaaataaaaaagacgactatgttttgtttgatagcattgattatgccattaaaatatgaaatcggatgtaatttttgaggttcagacatcactttcaacccctctcaaattcgacatagttctctcttcgattattttaacatcgtcatgagacatcatcggtaaataaatagtatgacctgcagtcataaatccaactttatacaaattaagcactttactaattggattagatttaatcgacaagtattgtaaacgttcaattcgactcgtttcttctttatatataaaaaatgatgtacgatattgtacacttagttgatcaactttataaaagcgacaatgatattgccataaaggcttaataaataattttaatgtactcagagcacctaaaaccaacaaaatataaagtaagtaatgtggccattcaaatcttaaccatataaaataaaaaatgacatacacagctacactcaatataaattctaagccattcgtaatgtagtaatacaacaatgctgacttaggactcttagtcaacttagtataatctgacatatacccctctccccaaataaaaaattatacggatttataatctatttcattttatttttatatgatgataattatagcatatggaatatttcatgctaatttattcttcctaaaggtacatctaaaaatttaattaagcagaaagtgcttgaattgctaaaaagacaccatgttataattttatcaacatgatgcctttcatctataatcaatctttcatcttatcaagagcgatatttagttcaagcacattcacataatcatttgttaacacaccacgctgcttacgatgttgaatcaagtcggccactcttgaagtagatacatgacgagcatcagcaatacgaggtgcttgcttcaatgcattttcgaccgtaatatgcggatctaagcccgacccagaacttgttgcagcatctattgttacatttgaattcccaaatttaacatgatgtttcatgcgtgctattaattcggtgtttccattcgattcattacttccacctgaagatacgccgtttttatataatttttcaggattcatattataatcaactgcactcggtctcccgtgaaaatatcgtgtctctgtccagtgctgtccaatcaattttgatccaactatacgattgtcatacgtaattaaactgccatttgcttgttgataaaaaaatatttgaccaattaacgtgatagctaacgggaataaaaatccacataataccatagttattatcgttaaacaaatactatttcttatcgtattcatggtacaggctccttcctctttacacaaaaaattgtacaatcatatctattaatttaatgcctaaaaacgggacgattaatccacctaatccataaatcaacatattatttataaagattctatcaatgctgtaaccctttacttttacacctttcatggcaattggaattaaggcaacaatgattaatgcattgaatatcaaagctgatataattgcagatttaggtgacgataaatgcataatatttagtgaagtcatttctggaattgttgacatcattagtgcaggtaaaattgcaaagtattttgctacgtcattagccaaactaaatgtcgttaatgcacctctcgtcattaataattgtttgcctatttttacaacctctattaactttgtaggattcgaatctaaatcaattagattagctgcctctttagcactaattgtccctgagttcatagctaatcctatattcgcttgtgctagcgcaggtgcatcatttgtaccatctcctgtcatcgcaacaatatggcctttcgcttgttcatctttgatgactttaattttatcttcgggtttacactctgcaacaaatctatcaaccccggcttcttttgcaattgtagctgctgttaaagcattatcacctgtacacataactgtttcaatccccatttttctcaattcagtaaatcgttctacaagaccatctttaatcacatcttttaaataaatcacgccaagcatgacattgttttcaatgactattaatggtgtgccacctttactcgatacatccatacagagagactcaatattaagaggaatattgccttgttgttgtttgacaagatttatcatactattaggtgcacctttgaataccgatatttcatttgtaatgattccgctcattctagtttcagctgtaaaaggcttatatgtgccatcaatgtctttaggcagctcatttatatacatctgcttcgctaatcgtacaatactttttccttctggcgtatcatcgtagattgatgacatataagcagcgactatcaatttttcaagcatttgttgattcactggtaaaaattcactagcgattcgattgccataagtgattgtgcctgtcttgtctaaaatcattacatcgacatctccacatacttctacagcacgcccacttttcgctaatacattgaattgagtaacacgatccatgcctgcaataccaatcgccgataacaaaccaccgattgtcgttggtattaaacatactgttaacgcaatgagcatcgcaataggtaaaattaaatgcaggtaagatgctattggatataacgttacaataacgactaaaaatataattgttaacgttgttaataatgtaaaaagtgcaatttcatttggtgttttatttctttccgccccttcaactaaggcaatcattttatctaaaaaagatgtacccgcttcactctcaacacgtatttctaaccaatcagatgttacaagtgtaccgccaatgactccatcaaaatcgccacctgattcttttatcacaggtgcagactcaccagtaattgcagattcatcaacggttgctaatccatttattacaacgccatcagcagggattgtttctccattttctacccgaatattttgtccggcttttaactctgtggcgttcactatccgatacgcaccattttcttctatcaatcgagcagttaaatttgattgtgcttgtcttaaactatcagcttgcgcttttccacgaccttcagcaaaggcttctgaaaaattagcaaacaatatagttattaataatatgataaaaattgtaatcaaataacctcgcgatagatagctagttccaaatatgtcaggaaaacatattaatatcaacgttaaaatcattccaacctcaacgacaaacattatcggattttttattaattgtttaagattcagcttataaaaactcattttcaaagcttctatcaccattgtttgattgaaatatttatttacatgatgcattttttccatccctttactttattttaaagttaaaaattcaccaataggaccaagtaatagtactggaataaatgtcaaaccacttagtaaaacgataaatacgattagtgatacgccaaaataaggtttatcaatcgctattgtatatttatcttgatggtatgattttttattcactaaacttgatgcaatcattaattgcaaaataattggtatataacgagaaagcaacataatgattcctgtagagatattccagaatgttgtatcatctttcagtccttcaaaccctgatccattgttcgcagcagctgatgtcatttcatacataacttgtgaaataccatgaaaagacggattcgttatactttcacttgctccaggaatcataaaagcaagtgctgaaaatactaaaattaaaattgggtgtatgagaaagactaagacaatacatttcatttcacgggcgccaattggcatatttaaatattctggtgttttaccaaccatcaaactgcatataaacaccgtcagtaagacaaatatcaataaattcatgagtcctacgccttcgccaccaaatacaacatttagcatcattaataccattggtcctaatccacctataggcgttaagctatcatgcatgttattaacagaacccgttgtaaatgccgtcgtaataactgtaaatagtgctgacaaacctgctccaaaccgtacctctttaccttccatattcggtccataaatgcctaaattcgctagtattggattaccacgatactcactccacatagttaatgtaagaattgctataaaaatgaaaaacattgcgacaaataatatcaacgcatgacgatgtactcgtttaccatgtctacttaacatgcgaccaaataagaacaacattgacataggaagtaacatcatactgcccatttctataaaattgctccaaatatttggattttcaaaaggtgttgcagaatttcctgctaaaaatcctccaccattcgtaccaagatgttttattgattcaagtgatgcaataggtccaaatgcaatatgttgaatatgtccgcttaaagtccgaatcattaaattagcatgcaacgtttgtggtacaccttgagtcatcaataaaatactaattaaacatgataatggtaaaagtactcggacaataaaccgaacaatatcttgataaaaattaccaatgatattagttaatccagttaaacgtctcaacatcgctatacaaacggcgtaacctgatgcactagatgtaaacattaaatatgtcattacaatcatttgcgttaaatatgtcacatctgattcaccgttatagtgttgtaaattactatttgttaaaaaagatattgctgtattaaacgctaaatctatcgattggtttaaattatgatttggatttaaaaaaagccattgctgaactattagcaatacaaatgttataaaccccataaatccattaaatgccagaaaatgtttgacatatgttttagctgacatgtgttctaaatctgtgccgataattttaaaacacatattttcaaatctagtaaatattaaatctactcttgacgattgcaccaatgctacgcgatatagatatccactaaaaacatacgtaatcataaccatcattgttagaaacaaaattatttccatgataaccctcacttaatatatttctaaaatttttcactacgaattaaggcataaaataaatacaaaactaatgcaataactaccagtaataaaacgatgagcattgccataacctccttacaacacaacaacatcgtaacaacttgtttatgagagaaatattaattttcaaacttagttattaagaaatcattaagatgtgtatgcagaaataaattttatagcatttaattgtgaagaatattatgatattgctatcgaggtgaaggttatgtcaaacactgaatcgctaaacataggaaaaaagcgtggatctttaacaatttacatcggttacagtccaggtgttggtaaaacatttgagatgctttcaaatgccattgaactatttcaaagtaacgttgatattaaaataggatatattgaaccgcatcagcgtgatgaaacaaatgcattagctgaacaattacctaaaatcacaaccaattttactaaacatggtagtcatcattttcaatatttagatgtcgaccgcataatcgaagaatcgccgacaatagtacttatcgatgagttagcacatacgaatatttctagagatcgtcatgagaaacgatatatggatattgaagaaattttaaatcatggtatcgatgttcataccactttgaacattcaacatattgaaagtttaagtagtcaaattgaactgatgaccggtgtacatgttaaagaacgtgtacccgactatttcataatgagcgccgatgtattagaagtcgtagatatctcacctgaacaattaattaaacgcttaaaagctggcaaggtatataaaaaggataggctagatgtagcatttagtaatttctttacgtatgcccacctaagcgaactgcgtacattgacgttaagaacagttgccgacttgatgagtgataaagaaaaagtccgacacaaccataaaacgtcactcaaacctcatattgctgtggcaattagtgggagcatttataatgaagcagtaattaaagaggcattccatattgctcaaaaagaacatgcgaagttcactgctatttatatagatgtattcgaaaaaaacaggcaatataaagatagtcaaaagcaagtgcatcaacatctcatgcttgcaaaatcattaggagcaaaagtaaaagtagtttatagccaaaccgttgcattaggattagacgaatggtgtaaaaatcaagatgtaaccaaattaattatcggacaacatattagaaataagtggcgagactttttcaatacacctttaattgaccatttaatgtcctttgaacatagctataaaatcgaaatcgttccaatcaaacaaatacctgttgaattgaaaatgaacaaatcaccctatcgtcctaaaggcaaacgtttcgccatagatatgttaaaaatgattttgattcaaataatttgtgtaatgatgggactgtggatttatcaacttgataagcatgagtctagtacgattattttaatgatttttctcatcggcatcattttattatccatttggacgcggtccttcatcattggctttttagcagcaattattaacgtatttgtttttaattatttttttacggaacctagatatacatttgaagtatatcgctttgactatcctattacatttatcgttagcattttaacaagtattttaacgagtgctttattaaaacaaattaaattccaatactccattactaaaaagcaactttatcgtacagatttattatttcaatttaatgattcgattaaacaaacttatacagttgaaaacttactaataaatgctggataccaaattaatcaattattgcaacaatcaattactatatacgttatcaatcaatcgaaagtaattaaaacaataccattgcaaaaccatatcgataatacgactcaacagcatgaacaagcattaagctgggtaattaaaaatgaaagacaagctggtgcaacaacagatacatttccaggcattaataaatggttgataccaattggcacatctccgattaaaggcattctagccattgattaccaaagttctcaagtgattaatccatatgatgcatcaatattagaatcaatgttaaatgaactttctctcgccgttgaaaatgtgacgttacttaaacaaacgagagaatccatgttacaggctgaacgtcaactgacacattcaaattttttaagatcaatttcgcatgacatacgtacaccgttaacaacaattatgggaaatttagatattttagtatcacatagtaaagatatgtctatcatagaaaaggaacaattacttgtacatagttttcaagaaagtcagtatttatatctattagtgacaaatattttatcattaacaaaattacagtcatcaaatgttcagataaaattgcaaccttatctcgttagtgaattagtagaagaaatcgatatgattttagaacgtcgccatttaaaaaagcgtataactgtatcatcctcagtaaatttacagtttatacacattgacagtaagttgattttacaagctttattcaatttgattgaaaatgcagttaaacacacttctactgacaccaaaatcaatttatctattcgttatgctagctatgaacaaatcgaatttgccgttatagacgaaggacctggaattagtttagaagaacaacaaaagatattcgagcctttttacacaggatcaaataaatattttaaagataaccaaaaagaaagcatgggactaggcttatatttagtacagactatcctacacaaacatcaatcaaacttacaatataaaccgaaccaaccacacggcagtatattctatttcaatatatatacagactttaacgaaggagacgtataatgcaatctaaaatattgataattgaagatgatcacgcaatcacacatttacttgatgttgcattaactttagattattacaatgtaactacagccgacaatgccacacaagcacactttaaaattcaaattgataaaccagatgtcattttattagatttaggtttaccagataaagatggattatgtttgatttcagaaatcaggcaacatactgacattcctatcattgtaataagtgcaagacaagaagaacaaacaattattcaagctttagataacggtgcgaatgactatatgactaaaccttttaatgttgatgagcttcgggcacgaatacgagtcatcgagagaatcgctaagtcacatcaagaaactaacattgtatttactaacggtttgctaagcatcgactttggctccaaatctgttgttattaataatcaggaggtacatttgacgccaaatgaatttagcttgttagaactattgtcaaatcataaaggaaaagtactcacttatgagatgatattaaaacgaatatatggctatgttaataagactgaaatgcctagtttaagagtgcatatgacatcattaagacaaaaactttcacaatgtcatgaggacgcaaaagatattattaaaacacatccacgcattggttatcaaatgttgcagtggaaagagaaataattaaataaaaaagatcgctgccattaaacgaatgattggcagtgatcttttttatattcaacttattatttatcgcgcactagcgtcagcaaaaagccctattgttttttataagaacatgatactgaaatttcataaagtttatttatgttcgattattcttaatttaaaaatagttctttaaattatatactcaccacatttggtggagaaccatatttacacagaatgatataaccgcatacagatctcaatccaattaaatatttaacctttaaaacgttagtactttgatatctacagagaatcaattattgaaaacaaaaaagagctcaagacattacatctttaagctcttaatctataaattatttttgatggtcagcaaatgtgcgacctttcataggtctgcttccaccgctgctcttctctttacggtcgaatttttttgtacttttcttcttacttgagtatccttttgaacgtttactcttactgtcaaatttaggattaccacgcttactatttctgttacgagaaccacttggtttaccgttacggcctttgcgagataatggtttttcaaaagttaattgaacttcaacttcatcgtttgcttctactaactcttgtaaaagtgcagcaactaaatcaacatcgttatattcatttaacaactctgtagaaatgcgtttcaagcgtgattctgactctttagacatccagttttcaactttttctttgatgtcatcttcacgtgcttgaagtacttctttacgatgtggtggacgaagtgcactcatttttctaccgtttgcatcttcaatttgtctgatataatccatttcgattggattaacaaacgttacagcgataccttctttaccagcacgacccgtacgaccaatacggtgtgtatagctttcagtatcttgaggtatatcaaagttataaacatgactcacaccagaaatatctagtcctcttgctgctacatcagtagcgactaaaatattaatttggtcatttttaaatttctttaatacttctaaacgtttcgcttgtgtaatatcaccatgtaaaccttcagctttatatcctttagaaatcaaagcacttgttaattcatcaacacgacgttttgtacgtccgaatacgattgctaattcaggttgatgaacatctaggaaatttgtaaatgtatcaaatttctctaattctttaacaattgtatagaattcttcgatttgtggatcagacatttcattattcattgtcttaatgatttttggtgatttcataaattgttgtactaaagcttggattgctttaggcattgtagctgagaacaacattgtttgacgttgtactgctggaattttatccataataaatctcatatcatcgatgaatcccatattcatcatttcatcagcttcatctaaaatcaaagtatgaattccgtccgtttttaatgtgcgacgatttaaatggtcgataacacgcccaggtgttccgactacgatttgtgggccttttttcaaggctttaatttggcgttcgataggcataccaccgaatacagtaacaacttggacaccttgtccacggctaaattctcttaattgttcagctacctgcattgccaattctcttgtaggtgctaaaatcaacgattgaaccccttgtttccctactactttctcaattaaaggaataccgaatgctcctgttttacctgtaccggtttgagcttgcccaaggatatcaattccttgtaacgcataagggatactgtctttttggataggtgtcggctctttaaatcccattgattcaagtgactgaaccgtattatccgaaatccctagttctttaaaattttgcaaaataattctcctttttacctgtttatttctcaatatacttttgcatataagttcattaatatttcatcaacttctatatagtaccaccaaaaaaatttaatcgcaataaagcaatttgcgaatatttattagaatcacattaattgattgtcatatttttgtcaaaaagctagcattagataagatgtaagcgttacgcatcattcgaataatcattataaaaaattttttataaaatacgtatatcgttaacattccacaacaaattttactgaaacacatgtgaaattagacattataatactacatctttttgtaaaacattatataaacattcaaactacttcctatataaagtgtgtacatagaattaaccttgatttagtttcaaatttatagatttaacataaaaagaaaaaggcaattttgtatttacacacaaaaccacctcttctttgtaatcttttagtattaattcaaatcatttttataagtaaaaggtccctcgactaatctctatgaaattaaagcatttaccacttcttctaatttcataccacgtgatcctttaactaatacacggtcatgcgcttttaaatcgtttattaaaacttctatcatatcgtctttagaattgaagtgttgtgctttttcgacatgttgctggcccgaatcataaatatacttcgcttcattaccaaacgtatacaacacatctatatgcttttcttctaaataattacctacaccgatatgcatttctttgctattttcacctaattctaaaacatctcctaaaattagaatgcgacgccctgtcaaagtactcagtgtatcaatagctgctctcatacttgtaggacttgcattataggcatcatttatcacagtaatatcattttctaatgtatgttgttccatacgcataccagttaagctgacattttttaaattttgatagattgtgttatatgtcaaacctaattcatgaccaaccgcaatggcaatcgtcgcatttttcatattatgctttcctaatattggcagatcgtaatgttctttattattaatcgtaaatgaaatacctgtagtatctctatcatcaacagaacaaactaatgcattatcagtagcaacaccaatactaatacattttgcattttcaacttctttaacatgtggtttcaataatggttcatcgccatcatatataaacgtaccattatcttttagacctattgtaatttcagatttagctttagcaatcccctcgcgcgaacctaaatcttgcatatgtgactcaccaatattagttataactgcaatatctggttgagcgaggtttgacagaaattcaatttcatggaaacctgacatccccatctccaatattgatatttcagtatcattatctaattccaaaatagttaaaggtaaaccaatttcattattgtaattaccttgcgttttcttaactttaaattcggtatgcaatacactttcaatcatatctttagtcgttgttttaccattagaccctgtgacggcaattactttagggtttacatgtctcaagtaagcttgtgccaattgttgtaatgccgttaatgtgtcttcaacccatataataggcccgcttacattttcatctataggtgtccctctttgataaaaagcagccccagcaccatcttgtaatgctttagagacaaagcgatgaccgtcaacattttcacctttaaatggtataaataacatatttttagaaattgctcgtgaatcaattgtgactccatttatctcttgatttaaaaattgatcttcaatttcacaaggaatccatgattgaatttgctttaatgtaacattaatcataataacaacctcagttagtcaattttgtatttatttttctgtttatcctggtgacgttctttagcaagctcgataagttttgtaatcaattctggataagataagcccatattttcccataactttggatacatactgaaagccgtaaatccaggcattgcatttgtttcattaatatatatttggttgtcttctgttacaaagaaatcagcacggactaaaccagaacaatctgtcgctttgaatgcctctaatgccatatttctaagcgttaattgaacatcttcgtctaagtcagctggaatttgtaattgaaccttaccatctttatattttgatttgtaatcgtaaaacgcgacatcttttacgacttcacctggccatgtcgcttcaggatagtcatttcctaaaactgctacttcaatttcacgtgcgttaacgccttgttctataacaagcttacggtcaaattggaatgcttctttaataccttctttaagttccgcttcattattacatttactgatacctacacttgaccctaagttagcaggtttaacaaagactgggtaatttaatttatcatttactaattttaaaatgttatgttcatatttttcatattcagaacgtaagaaactaatataaggtaactgtggtaaccctcgatgttcaaataattgtttcattacaagtttgtccatagaacttgcagctgacaatacaccatttcctacatatggtacatccaaaacttcaaaaagcccttgaatcgtgccatcttcaccattaggaccatgtaataatgggaatactgcatcgtatggttgtcctgaactactttctttcaatagctgtgaaatctcaagcgcctctccattttctaaatgaagctcatcagtagatttaatttcagctgtaatattattttgctttctccaatcaccatcattggtaatataaatgatatcaacatgatatttgtctttatctattgcatttaatacattttgtgctgtcagaatcgatacttcgtgttctgcacttttccctccaaaaacgatacaaatattttcttttgtcatttcgttttcctccaatgatatatcagggtttgctaccttaatataaattaatattgatttagtcctattgttaattgatttattcgcatctttgaatcttaatagtatcacattttaatgctattttgcattttaaaaacgaggacttatgtgtctgtatctatgttgattcatttataatcagaacaatattcccttctattttattcctaattcaaattgaaatctatagctgatatcactgtgatattctagctaatttttaaaaagtcatgtaaaattgatataaacattagtgagtataaaaggagtttgcaatgaattattcatctcgtcaacagccggataagcattggcttcgcaaagtagactgggtattagtagccactatagctgttttagcaattttcagtgttctgcttattaactcggcaatgggcggtggtcaatacagtgctaatttcggtatcagacaaattttttattacattttaggtgcaatttttgcaggtatcatcatgtttatttcacctaaaaagattaaacattatacatatttattgtatttcttaatctgtctattattaataggcttgctcgttattcctgagtcacctattacacctattatcaatggtgccaaaagttggtacacgtttggccctatcagtattcagccatctgaattcatgaaaattattttaattttagcattagcgcgtgtcgtttctagacataatcaattcacattcaataaatcattccaaagtgatttgttattatttttcaaaattattggtgtctcgttagtaccaagtattttaatattactgcaaaatgacctaggaactacattagtattagctgctattattgcaggtgtgatgttagtaagtggtataacatggcgtatcttagcacctatctttattacaggtattgttggtgcaatgacagtcattttaggtattctatatgcacccgcattaattgaaaatttattaggtgtccaactgtatcaaatgggacgaatcaattcatggcttgacccctatacatatagtagtggtgatggctatcatttaactgaatcacttaaagctatcggttctggacagttactaggtaaaggatacaatcacggtgaagtttatatacctgaaaatcatactgactttatcttttcagtgattggagaggaacttggctttatcggttctgtcatattgatcttaatatttttatttttaatcttccatctaataagattagctgcgaaaattgaagatcaatttaacaaaatctttatcgttggtttcgtcactttacttgtgttccatattttacaaaatattggtatgacaattcagttgttaccaatcactggtattccattaccatttattagttatggtggtagtgcgctatggagtatgatgactggaataggtatagtcttatcaatttattatcatgaaccaaaacgatatgtcgatttataccatccaaaaagtaattaatttaaactattttgagtttcaaatatcataacttttcaagatgacgttatatagtctatttacgtcgtcgatttaaaatgtcatatatagatattactcgataataacaatccctctttgaagtacacattgtaaaatgtacactctaaagagggattttgttatatagtacttgctttcattttagtaaatccagtcaaaaaagctatcatcgaatagtccgacgatagctttaacggtgtgtgattcacaatcacagtcaattattttaattcgtgacttactttattagatgctggcaaagtattaataatgtctaaacgagatttagtttttttaatattcacacctaatgatgacaatagtttgactacattttgaatcttttcaggacgtttcattattatcacctcgtttggatcgctttcaatattatcttaccctattcgacatacctttactacatcatttacaaaatttttaatttattttcaaaattaaaatctatagcgcactctacattataccctaaaatacaattttgtatccttcatcatagatttctttttcaatactattcaaatttgctggtgtctcatacgatacagttacttgaccatctattatattaatattcacttgatgaacacctatcatatttgaaatgcgttctgtcaattgacttacttgttcttctgtttcaattcccgctgtgtaaatcgtattttgatgtatcatcttaaactcctttagtctttaatcaatttttgaaaagtcactaataactcttccattgcctcttcctgagcaccttgattaactttattcataatacaacttttcatatgttgttctaataactttatcgcaacactgtttaacgccgaacgtgtcgctcttatttgcgtaaggacatcatcacaatagacatcttcttcaatcatgcgattaatcgctctcacttgtccttcaattcgatttaaacgtgatttaagattcgtttttatttgttcagaatgatgtgcattatcttgttcagtcatagcattcactccttcatttacattccttactatactatatcccataaaacacaacgtcaacacaaagtgtgtttttcaaactaaattgtcatgatatttaaattgcttcatgatacaattaataagatatactactcgtttaagattttcgatgggaggtttcaaatgatagagttattatccattgcactcaagcattctaatattattttaaattcaatatttattggtgcatttattttaaacttattattcgcctttaccattattttcatggaaagacgttctgccaattctatctgggcttggttactagtcttagttttcttgcctttattcggcttcattttatacttactattaggacgacaaattcaacgtgaccaaattttcaaaattgataaggaagataaaaaaggattagagttaatcgttgatgagcaattagctgctttaaaaaatgaaaacttttcaaattccaattatcaaattgtaaaatttaaagaaatgattcaaatgttgttatataataacgcagcatttttaacaacagacaacgatttaaaaatatacacagacggccaagaaaaatttgatgacctaatacaagacatccgtaatgctactgattatattcattttcagtactatattattcaaaatgatgaattaggtcgtaccattttaaatgaacttggtaaaaaagcggaacaaggtgtagaagttaaaattctttatgatgacatgggttctcgtggactgcgtaaaaaaggcttacgcccgtttcgcaataaaggtggacatgctgaagcatttttcccatcaaaattacctttaattaacttgcgtatgaacaatcgaaaccatcgaaaaattgttgtaatagatgggcaaattggatatgttggtggttttaatgttggtgatgagtacttaggtaaatcaaaaaaattcggctattggcgagatacgcatttacgaattgtcggggatgcagtgaatgcattgcaattacgatttattctagattggaattcacaagccacacgtgaccacatctcctatgatgatcgttatttcccagatgtaaattctggtggaacaattggcgttcaaatagcttctagtggtcctgacgaagaatgggaacagattaaatacggctatttgaaaatgatttcatctgctaaaaaatcgatttatattcaatctccctatttcatacctgatcaagcctttttagattctattaaaattgcggcattaggtggtgttgatgtcaatatcatgattcctaataaacctgaccatccgtttgttttttgggctactttaaaaaatgcagcatccttattagatgccggtgttaaagtatttcactacgacaatggctttttacactcaaaaacacttgttatagatgatgaaattgcaagtgtgggaacagctaatatggaccatcgcagtttcacattgaatttcgaagtcaacgcttttatttatgaccaacaaattgccaaaaaattaaaacaagcttttatagatgatttagcagtatcttctgaattaacaaaagcacgttatgctaagcgaagtctttggattaaatttaaagaaggtatttcacaattattgtcacctatcttataaaatagaaatatgaggagtgtaactttaatgcaacaatcagacgtcattagtgctgccaaaaaatatatggaatctattcatcaaaatgattatacaggccatgatattgcgcatgtatatcgtgtcactgctttagctaaatcaatcgctgaaaatgaaggtgttaatgatactttagtcattgaactcgcatgtttgcttcatgataccgttgacgaaaaagttgtagatgctaacaaacaatatgttgaattgaagtcatttttatcttctttatcactatcaaccgaagatcaagagcacattttatttattattaataatatgagctatcgcaatggcaaaaatgatcatgtcactttatctttagaaggtcaaattgtcagggatgcagatcgtcttgatgctataggcgctataggtgttgcacgaacatttcaatttgcaggacactttggtgaacctatgtggacagaacatatgtcactagataagattaatgatgatttagttgaacagttgccaccatctgcaattaaacatttctttgaaaaattacttaagttagaatctttaatgcatacagatacggcgaagatgattgctaaagaacgtcacgactttatgatgatgtacttgaaacagttttttacggaatggaattgtcacgactagacattgaagttgtagtatgatgatgcgatgtaatggcgtgttgttgtggaagcttggtgtcatgccatgttactttgatgtgttgttgtgggagcttggtgacatgtcatgctactttgatgtgctggtaccacgatgcgtcttgatgtagtgctatgatgtggcattgcggtgttatggtgttatagacaggtttggcgttgatgccatgttactttgatgtgctggtaccacgatgcgacttgatgtagtgctatgatgtggcattgcggtgttatggtgttatagaccggtttgatgttgatgccatgttactttgatgtgctggtgctacgatgcgacttgatgtagtgctatgatgtggcgttgcgctgttatggtgttatagccaggtttggtgttgatgtcatgccgttacgattctatgatatgttgttgggacgttgcaatgtgtattatgccgttgtgacgttattatttcacactgttacatgtataagtgaattgctgtggaaatttgcgacatatactgctacactgatgaatcattgtgtcaagatgacattgcgatgaagaatgacaactctgttattaaccactttttacatactgaaaactcgttaatattatttcaaataaaaacagcagtaggatgactttcacatttgaaatcatcttactgctgtttctatttatcacatattgtataatgtgacactaagtttcgctattgaagcgaaaaataatgtgcgccctataaagttaaaattatcttcaacttttagggtgcacattatttggacttgctaaggttatttctttttctttttagacacaacttgtgtgtttttgccttttttattgctgccgccgttgtgctctctttcatacgcttcaatgaaaggttgtacttcttttttagcgactttttcataataaatgttcgcaaagtgtgtttgaactacaaggaacgccgcactgactgaccagtacaaaccaagtgctgatgctgagcttaatgaaatccagataatcataattggtgaaatgaccatcatcatgtaacccatttgacgttgttcgtctggcatcgttttacttgatacatatgcttggataaagtataaaacaccggcaataattgtaatccaaatatcaggacgtcctaaatcgaaccataagaagtgtggatatttaaacaaaccatctacaagttggtctttaagtacaaagtataatcccatgatgattggtaattggattagcattggtaaacaacccaacatactcttaatcgggttcatgtcatactttttatatacttgcattaattcttggtttgcagccattttttcttcttgtgtacgcgcacgtttcactttttcttgaattttttcaacttctggctttgcaactttcattttttgacgcatcatatgactatttttatagtttgacaacatgaatggtaataaaataatacgaattaccaatacaaggataataatagctaaaccataattgtcgtttaataagttatttcccaaccaatccaatacatttttcattggatctacgaatgtattgtagaaaaacccactacgtttttcaggtttagaatagtcacaaccagccaaaaagaccataatacctaaaaataatggtagtaacgcttttttcttcatttttccacctctatcattatattcacataggatttattctatcacattaatgagtacgtatgaaacaataagtggaaaaatttaactaattattaaaaaaatctttgaatcgattaacagtcttttcaatattttcacttttagaaatggctgaaatgactgaaattccattggcacctgcttctacaatcggcgccacattattagtattgataccgccaatagctacaatcggtagttgcggattcatttctttaaacgttgcaatcatttctggacctactggtatatgcgcgtcatgcttcgacggcgtaggatagattggtccaacacctatataatcaacatgagttaaatcagattttgcatactcatctaaatcactaatactaagtccaataattttatcagtgaaatattgtgctatctctttgactttcgcatcatcttgaccgacatgtataccatccgcgttaatttcttttgccaaggatacatcatcattaacgataaaaggcacatcatattgatgacagagatgctgtaattctttagctaatacaagtttatcgtttccttttaaagctgattcacccttttctcgaaattggaaaagtgtaatccctgcctttaatgctgcttctaatacttcatgaatagttcgatgactcggaacatcggaggtcccacaaataaaatacacatttagatacgattggttaaacatattattccacctcttgaatacgaatccgttgttgataggttgtttcatttaaatgatataacgtatcaagcaacaatggtgaaaacgtaccaggaccaccacaattttcattttcagcagctacctcagcagcaatattaaatacgcttaccgcttcaattaacgcttctatgtctggttctgtttctctaaataaaaatccagcaataacgcctcctaataaacaaccagctccagttactcgtgctaataatggagatccattagctaatacgaaggctttattatcttgaacaataacgtcctctttacctgtgattactattgcagttttatatgttgcgtaagcctttttcgctattgcaaccgcatcaagattagcatcactatctgtacctttcatagttgctgtatcatcaatcaacgctaatatttcagatgcattgcctttaattactgatactttcgctgatttcaataataatttacaaaattgctttcgatatgtagaagcaccaacagctacagggtcaaatacaataggtaagcctgcctcatttgccgtttgagcaatcgcaataatatcttgttcattttctgctgttaaagtaccgatattgattaatagcgcttgtgcaactttgtaaaattcttcagcttcttcgggagcttcactcattgcagggctagcaccaatacttaataaaccattcgctgtaaaatttttaactacatcgtttgtataacaaattgttaatgggttttcaatacgtattttatttagataattcatcgtctaatccctctttctttaaatatgcaaaatgattcactggacctctaccacggccgatttcaggcgtatattgtatactcattgaaataaactttttagccttgtgtacagcctcaaataatggtctaccttttgcaagttctgccgttataactgctgaaaatgtacaccctgttccatgcgtatgttttgttttaaatcgttcattttcaaatgtttgaacaccttcgttagtaaataaataatcttttgctatatcagtatcatttgaatgaccgcctttaatgatgacacctttactaccaatctcattaataaagatgcggccagcctgcataattttttcttcactatcaatggttagtcccgttatttcttcagcttctggtaaattcggtgttactacgtcagctaatggcaataacgtatgctgcaagttttgctttgtgtcattatccattaatgaatcaccgcttttcgccaacataacaggatcaattacatatggaatagattcatgttgcattaaataatgacgaatcgtttccatagtatctgctgtagcaatcatccccgttttaatagcatgaggtaaggtatcattgaagacactatcaagttgttcatctacccattgatgatttaaattatgaatatgttgtacgcccaatgtattttgagcaacaatacttgtaacgacgcccataccatatacaccacatgaatgaaatgattttaaatcagccattacgccggcaccacctgttggatcagtacctgcaatggttaatgctattttaggtttaatcatttacttttcctccaaattcccattgttctagtgtcatagccatattgaaaaatcgacgctcatgtatgcaactttctaaaaatacttgctttacttgttccaattccttgtcagacattgattcggctaatttattcattattgcctcaaatacgttaattatgtcatccatttcagtactataaaaatcaaaccattttgccgtatctttttctctattaagcttatgatcactttgagagcgcttagctaattctgcataaatatatggacaaggtgccattgcagcaattgtataaatagcattttcacgactatgcgcttggaaatacatatgttttatgtaatggtcgccacttggaggccaaacttttgttttaatgatttcttcgtatgattcaccaacaatttgcgctaaaatatcatgcgcaagtacttcaccttcaaccataaattctatttgctctactaaaaattttacgtcattcatgctattcatttttggaattaacaaagcatataagtttgtaaattcttttaaatacgcagcatcagcttttaagtaatggcgtaatgcgtcagctcctatatctccggataacatcttctgaataaagtcatcctcataaatatcattaatgattggctttgcagcttggtacaatttttgtgaaaattccattgtaaaaaatcctccctaaataaaaaaactacttccaacatgaaagtagtttgatggcaatgttgctatactagccccatcacttcaataactactttcctacgttggtactaaccaaatcaggtcataagggtctgaacaattcatctcagccatatcattaggctcccctagtagttccttagtattcaattgcaaattaatcttagcaaacggtttcaacattttcaattattgttgctcagttgtattattatctttaaataataattctataatgacatatatttgcgaaataaaaaaaccggaacatatcgagaattccccgatatattccaatctaaaagttacttatataactattaattagctatgcataaatggcttatgcagtaacccaatgtccagcgccaccagtgttatataattttactgctgcggcatcttgaacactttcaggagcatttgctggtgatacacctttatatttagcaggtgctactgaatcccaagttgattgtaagaattgatacttaccagctgcacctgatgttggatttacagcatgaatattgccacctgattcacgttgagcaatttgttttagatgagcattcacatttactgatgaaccttctgatgattttgattcagttggtgttgcagtaacttgtgaattgtttgatgttgatgcttgtggttgttgagtttgagcattttgtggtgcttcaacttcttgtgattgtacttgattagcttgaacagctgatggtgcaacattattagttgcaggtgcttgtgcactcatgtctgctccattagtacctgttgcatggtaattccaagcaaagtgtgtaccatctgattcaaagtgataagtaaacccttcatagtcaaatgtataattataagccccagcttcaattggtttttgatttaatgtttgatcatttgattgcgccatttgcgctaaagatgctttatttaagtccgcttcacttgcatgggcttcgtgacctgcatttcctgctacgattcctaaacctactgctaatgatgatgcgagtaatgttttcttcataatcttaaaatcctcctacaagtaatttgtttctctaaaagttttacagagactactgtaacatctataaaatccgtgcaggttacaacaaaataaaaaaatagccttgttttttacacagtgattacaacgaaatcccccataatttcagatatgattctatcgagaattgtcatgacagtaaaaatgttttttatttgcaattttttatgtaatcgttttgcaatctatgtctattttctattagaaaaactacacaaaaagacgacctacacaacagtactagtcatgtaagtcgtttttaagtgagtatatttcaagttaattagatctataaaaaatttaggatggattaaatgtatattaaggatgtttaggataattggatttaaatttctaataagtcatgattatctatattttgagagtcaatatctaaaatactatctgagagaatttcattattttgggatttaggggacataaattttattgtttcaacatataattcagtgacaaagtgtgtttgtccgtctttatcatactttcttgatctcatttgaccagttataccaaccaatgtaccttgattagtatatttttctatattagaagctaacttgccaaatgctttacagaataagtaatcacagacgatttctccattttcatctttataatttcggtgcgttgcaacacaaaacgttgcaatttttctatcctccttttcaaatatttgtgcgtctttcgtcagtctcccgacaattacgattttatttagcatgtagtgtgtgattcacctcctatgcctatatcttaattactagcttaaaaatggtcaaaatggcaaattttatataattaatagctatagcatctcgttatttgttatatttaaagaaattagtcatgaaatgaccttaaatcttctaaataattcaaaaatcataaatattaaactaatgggatgtgggaatatgaaaacttttaaagcagtaaggtttcaaattgtgaatgaacacggcagaattatagaatatgaattagaagatggcgtaataattaataaagaggaaagtggcacgggttggttgcttgaaattgtcatttctaatgagcattatgaaacatttaaggaatatcaagacaatgaacagttattggatattcgtgtcgtcatcacgcgtccagccaatgatccagctttatttgaatctactgtgaaaagtattaaaaattttaaaacaacaatgtctatcgtatttgaatgtcatatttacactttacgtcaacagtatgctgaaagtttattagaacaacttattgatgatggattatctggtgaagaattaaaaaaatcatttaatcgaatgatgcagtctaaaccaaagttaaaggatgaaaaattagaagagtaaaataaaaaacattcaaagattatgccaacacattaaatctttgaatgttttttttgttttattttacatcttgaattgcaaatgtaagttcacaactacaagcaagttgaccatcgacagtagctttagcattacctttacctattggtcctttaattttagtgatttctacttccaacgttaaagtatcaccaggtactacttgacgtttaaaacgacatttatcaataccagcaaataaagcgattttacctttattttcttcactatttaaaatagctaccgcacctgtttgagctaacgcttcagtaattaatacgcctggcattaccgcatactcaggaaaatgcccttgaaagaatggttcgtttcctgatacttgtttaatagccacacaacgttgaccttcttcatattcaactactttatcaattaataaaaatggctgtctgtgaggtataatttgtttaatttggttataatcaaaaattgtttccatggttgaaatcctccattatattaatttactgaattaatcgttaatacgttcaatgtctgcacctaattgcttcaatttaccgtgtaagtcaacatagcctctatctaggtgcgttaattcagtaacgcttgttttaccatcagcaactaatccagctaaaattaaggcggctgctgctcttaaatcagtcgctttaacttgtgcaccttgcaattgacttttaccttcaagtttagcactacgaccttctacattgatattagcattcatacgtttgaactctgcaacatgcataaaacggttttcaaaaacagtttcggttacgactttatgaccatttgccgttaataacaatgccatcatttgtgattgcatatcagtcgggaatccaggatgtggtagagttttgatgtctacaggttgtaattccccttcagcacgtacacgaataccatcttcttgatagtccaattcaacgcccatttcttctagtttatagactaaactcgccatatgttctttgattgcaccacgtacaaaaatatcaccacgcgttatagcaccagcgattagtaatgtgcctgcttcaattctatctggaatgatagcatgttctacaccatgtaatgattctacaccattgattgtaattgtgtctgtaccagcaccagtaattctaccacccatttcattaatgtagtttgctaaatcgacaatttcaggttctttagctgcattttcaattaaagtcttacccttagctaatgatgctgccataataatattttgtgttgctcctacacttggaaaatctaaatgaattgatgtaccttttaatccatctttagcattagcataaatattaccattttcaagatgaatttctgcgcctaaagcttcaaaacctttaatgtgttgctcaatcggtgtacttccaattgcacaacccccaggcaatgcaacaatagcatgtcctagtcttgctaaaagaggtcccataactaaaatacttgcacgcattttactaacatattcatatggtgcctcttcatttagagtctttgttgcatcaacgacaacagcattttcgtcctttttgtatgtaacgtcagcatttaaagttgttaatacattatttattgtttctacatcacttaaagctggaacattaactaatttgctcggtttatcagaagctaataaagatgctgtcaatattggtaatactgcatttttagcaccttctactttaacttcacccgttaatttatttccacctttgattactattttatccatcgtaaatcctccacttagaactcctattactttacatttccctattttaaaattattttaagtcattatttaattatatctagttttgattacaaatcatagagttagacttattttattaaatattttacctgcgtcgagtattgtaacaaatctacaataaaattgcttactgcagtgcctaataaaatagcaacaaatatcatacacacttgtaattgagtggcgtatccttttttaaaaaattgatctaatctaattgattgtaaagcccaataggcaatacaaatacatacaacatgtaacactaaatggataactgcatattgtccgatataatccattttatcacctcataagattactgtattacattgtacatgaaaaatttaaataatgatacaaagtttaatacccgtttttagtaaagtttaagctaacttactatataattctttttacataaatatcataactataaaatatcttggtatgaaaaaatgtagataatttcaaaaaatgaaatgtcgactgtagatagtggtgaaggaaattttgattttagcaatctattagtgattgtaaaaaagtaaaactattcttgggagtcggacataaatcaatgtctagactctatagtgttgtatttggcagtagttgacggggccccaacataaagaaatactttttctttagaaattagtatttcttatacatgagttttactcatgtattcctatttttaaatacacattagctgtgtttaatgataaagaaccactacatcataaatctttaatggttctttatcaattccttcccccctctcatgttttgtatctttaaatcaatataattcaaaaaagggtcgaagatatgaaatcacatcttcgaccctttatttactattttaattcagccacacgcaaacggttatttgctctctctaaagctctttcggctctatgaatatcagtattgtcgtcatcattttccaagtgagactctgctcttgctttggctaatttagctctttcaacatcaatttctcttgcagtttctgcagtctgaacaatgattgaaactttatcttttctaacttcaacaaagccatcgcttacagcaatatattcagttccatcgtgaaatttcacttttacaaagcctgtttttaaagcagctacagttggaatatgtccactcatgacacctatctcaccagctgttgtttgcataacaacgagttcaacattatcacgattgtaaacagaaccattaggagtgacaatatctaggtttaatgtattcattatccattcctcctaattgttatacttcaacacccatatctttagcttttgcaataacatcatccatgctaccaactaaacggaatgcatcttctggaatatggtcatatttaccatctaagatatctttaaagtttgcaactgttgtcttaacaggtacataagaacctttttgaccagtaaattgttccgctacgtggaagttttgagataagaagaattgaattctacgtgcgcgttcaactgtttgtttatcttcatcagataattcgtccatacctaagatagcaatgatatcttgtaattcacggtatttttgaagtgttgattgtacatcacgagctacttcataatgttcttgacctacaattgatggttccaatgctcttgatgtagacgctaatggatccacggctggataaatacccatttcagttaatttacgttctaagtttgtagttgcatctaaatgggcaaacgctgtcgcaggcgctgggtcagtatagtcatcggcaggtacgaataccgcttgaatagaagtaactgatccttttgttgtagacgtaatacgttcttgtaattgtcccatttcagtagcaagtgttggttggtaacctactgcagaaggcatacgacctaataatgcagatacctcagaaccagcttgtgtaaatctgaaaatgttatcgatgaataataatacgtcttgaccttgttcgtcacggaaatattcagccattgttaaaccagataatgcaacacgcatacgtgcaccaggtggctcattcatttgcccgaataccatggctgttttcttaattacaccactgtcactcatttcgaagtataaatcgttaccttcacgagtacgttcacctacaccggcgaatacagaaataccaccgtgctcttgagcgatgttgttaattaattcttggattaatactgttttacctacaccggcaccaccgaacaatccgattttaccacctttaatataaggtgctagtaaatctactactttaatacctgtttctaaaatttgaacttctgttgaaagttcatcgaatgctggtgcttgacgatggataggatcgcggcgaacagaatcactaatttcttctttaaggtcaattgtttcacctagtacattaaatacacgacctaatgtttcgtcaccaacaggtacactaatttctttgcctgtatcttttacatccatgcctctttggacaccatcagttgaatccatcgcaattgtacgaacaacgtcgtcacctaattgcagcgcaacttctaatgttagttgtattgtaccttcttctttaggcacatcaataaccaaggcgttattaattttaggaacttcgttatgttcaaatcgaacatcaattacaggacccataacttgagttacacggccaattcccatgctattttcctcctttaaatattattcaagcgctgcggaaccaccaacaatttcagtaatttgttgcgtaatttctgcttgtctcgctctgttatattctaatgataagtcatcaataagttcagttgcattatcagtggcatttttcatcgcagtcatacgtgttgcatgctcacttgcttttgcgtctaatattgttccgtaaatcaaactctcaacatattgaggcaagattacacttaagatagattctttatctggctcaaattcataagaagacaaatgaccatgccccttactagaatcctcttgagataatggtaatacttgtctagatgtaggcttgttttcaagaacgctgacataatgactatagtatatatttaattcatcaatttcttcttcactgtataagtctatagcatggttagctagtgcttgaacagatttgaaagaaggttgatcaggtacgtctacttgagaatactcaatgtcataacctctattttttaggaaatcaacaccttgttgccctaaaactacaatactgtattcgctactatcttgatgtttcgcttcaatatcagtaatcaattttttaagcacgtttgcactatatgcacctgctaaacctttatcactcgtgataactaaatatccacttctagtaattttacgaggtcttagcattggatggtttgtattgctacttgcccctgcaactgcagtaattgcatcttgcattttatccatatatggtgtgaattgttttgtatttttttcagctctacgaagttttgaacttgataccatgttcatcgctttcgtaatctgcttcatttttttggttgattttattcgagtatctatttctttaagagaagccactatctcaccaccttatactaaacttgtttattattcagatttgctaaagctttttttgaattcgttaattgctgtgtcaaacttctcagcatctggtaagccaccagtttctctgatttcatttaacagttcagtagcatttgattctgcccagtggtttaactcgtcttcaaaacgtgtgatatctacaactggaatatcatctaaatatccttttgttaatgcataaataatcaacacttggtgttcgactggtaatggtttgttttgatcttgttttaagacttcaacagtacgtttaccacgttctaatttacttgcagtaaattcatcaaggtctgaaccgaattgtgcaaatgattcaagttctctgtatgacgctaagtcaagacgtaacgtaccagcaactttcttcattgctttaatttgtgcagatccaccaacacgagatacagattgtccggcattaatcgctggtcttacacctgagaagaataaatcagattgtaagaagatttgtccatctgtaattgaaataacgtttgttggtacataagctgaaatatcaccagcttgtgtttcgataattggtaatgcagtaattgaaccgccacctaagtcatcgtttaattttgctgctctttctaataatctactatgtaagtagaatacgtcacctgggtatgcttcacgacctggaggtctacgtaataataatgataactcacgataagctgctgcttgtttagttaaatcatcataaacgattaaaacatgtttaccgttaaacatgaattcttcacccattgttacacctgaatatggtgcaatatataataatggagaaggttcagaagctgatgctgctacaacaatagtgtagtctaaagcgcctgcttgtcttaacttttcaacatttgctcttactgttgaatctttttgaccaatagcaacatagatacaaatcgtaccttgatctttttggttcaaaattgtgtcaattgcaattgttgttttacctgtttgacggtcaccgatgattaactcacgttgacctctaccaattggtactaaagcatcaattgctttgatacctgtttgtaatggctcatctactgatttacgatccattacaccagtagcttttttctctactggacgtgttttagttgtgttaatcggtccttgtccatcaataggttgtcctaatggattaacaactcttccgattagttcttcacctactggtacttccatgatacgaccagtacgtttaacttcgtcaccttcagtaatacctgtgtatggtcctaaaataaccacacccacgtttgactcttcaaggttttgggctaaaccaagtacgccgttatggaattctactagctcaccagccataacgtcatttaatccgtgaattaatgcaataccatcaccaatttgtaatacagtacctacatcagttacggacatttctgactcataattttcaatttgtgagcgaagtaatgcactgatttcttcagcttttatggccatctatgtcactcctctttataattaattaactcttctaaattttctttgtaattggacaagatcatttctaacactaccatctaatacagttgtgccgactttaactctaaatccaccaattaaatctggattaatttttgtatctacaataactttagataacttcgtttgttgagttactagtttgacaatcttatctaactcttcttgactcaattcatatgttgactcaattgttgcaaaatcttgattgtagtgtccgttatataagctttggaacgccttgaatacgtcagctattaatgagatatgtctattatctgctaacacgtacatcatatttttaatgtatggattaatgtcagtaaatacaccattaatcaactcacgacgttgttctgctgtttgagttggattactgtcaaccattctcaattgctcaattttatcttttactgcttcatttataactgttaattcttcattaatagtctctaaattatttgtatctaatgacacgtcaaataatgctttagcatacttgttagctacttttaccattatttatcgcctgcctcttttagatacttgtcaaccaatgctttttggtcttgttcagaaatttcttttctaagaactttagaagcaattaacactgatagttcagatacttgattattaatatctgcaatggcacgttctttttggctattgatttcactttgtgctgtttcaatcataccgtttgcacgtacgtttgcttcatgaataatttgttcttgctgttgacgtgcttgaaccttagcatcttctaaaatcttttgaacttcttcttgtgtttctttaagtttttgtttattttcttcttcaagtttctgtgcatttaacttagcttgttctgcgtcatcgatatctctgttaatatctctttcacgtttatccattacatctttcaatggaccccatgcgaactttttaagtaacgcaagtaacacgatgaaagttaggacctgtacaatcacagtaccccactcaacgcctccagctgcaccaagaacgaataagttagctgtttcagtcacgggttcatgacactcctttcattaaaataatcgctagtgttatatagaaaaaaacgacgaggttaggacctactgaatttatgcgataggcatggtgcgttcatatctcaactatttaataaagttcaaagatattactatatatgcatcatgaattatgtcctatgcgctttgtcccgacctcttttatctgttaattatccagcaaatgtcatgaatgcaattactacaccgatgataggtaatgcctcaactaaacctacaccaatgaacatgatacccattaattgaccacgtgcttctggttgacgtgctacaccttcaactgttcttgaaacgattaaaccgttaccgatacctgctcctaatgctgataaaccaattgcgattgctgctgcgattaaattcataatttaatttcctcctgtgattgtatataattattgaaatttttagtgttcatctgccactttatgtgacatataaaccatcgaaagcataataaagatatatgcttggattgttcctacaaatattgaaaatgcttgccaaacaattaatcctgggatactaataatccaaccccatgctggttcgttaaagaataagccagcaagtaatgttaatagtatctcacctgcaaatatgttaccgtacaaacgcagaccaagcgttaatgttgaagtgaactcttcaaaaacattaataattgccaatggccaaaacggctgtacataacctttaagatattgtttcgtaccacgcattttaattccataaaagtgagttaacagtattatcgttgtagacaacgttaaagtcactgttgcatcagctgtcggtgatttccaccacaatgtgtgatctttcgttactatagaaaacggaagacctaacatattagctataaaaatgtacagaatcagcgttactgctaagaagtggaattgaccaccttttttccaagccatgttaccttcaatgattcccctcacgaaatcaaaaatccattcaacgaaattttgtttgccagttggtctttttttcaaattacgcgtacaaatgatagcaagtagaaaaacaagaaacgccgtaacaagtatcatcaatatacttgataaattgaaaacgatatcaaaaccgaataaattccaactcacgagcggggatttgtgatccataatctcacctctttcttaatttatttgctcacctttagtaaaggacgtatgataactacaacatatgaaatcattaaaccaataattataccgatgatacttacatgcgctttattaaggtaccaaatcatacaggcaataattgcaactaagtatcgccacatatttccagttgaaatatgcatagtgtctggtcttttagctttagctaaatagcattcaaaaatacatgtgttgattgcagaaccagtaacaccaatgattaatcctaagataaatgcatggtgtgtataaaggtataatcctcccaatattattattagataaaaataatattgaatgaactgtttaaaaatgttgtagaaacgactcattttatatgcctccgtgtgactgatatcaatcatgaaaaccgttccactcatacaaactaaatgataatataggcgatttgtggtgtcaattctattcaaattgttgtaaaaaaataagcatagttagacacaatttagacacaattagacaaaaagtctattttcctcagaaatcgcttggtttttcagtgattaaattcaaataatacttaatatgattaactattctttctgaagcaaatccatcaccgtaaggattagatgcttcagacatttgatgatataatctctcatcatcgattaattcttttgcagcttgatacacattttgcttatttgttccaatgacttttaatgtgccagcttcaacaccttcaggacgttctgtaacacttcgcaaaactaaaactggcttattaaatgatggcgcttcttcctgaattccacctgaatctgtcaaaataaaataagattttttagcaaaattatggaaatctactacgtccaaaggttcaatcaattcaattctgtcatgactacctaaaatcttttgagccacctctcgaactttcgggtttttatgcattggatataccagtgctaaatcagtatactcatctattaagcgtctaaccgctttaaatatattttccatgggtttcccgatattttctcgtcggtgtgctgtcataagaatgaattttttgtcatggtatttatccatgatgttagatttataattgtcatcaactgtatatttcatagcatcaatcgcagtattaccagtgacaacaacactttctgaatatttcccttcacttaacaaatgcgatgcagcatttttagtaggtgcaaaatgtaagtcagctaatacaccaactaattgtctattcacctcttctggaaaaggtgaatatttatcataacttctaagccctgcttcaacgtgtccaatcggcacttggttataaaatgccgctaaaccacctgcaaatgtcgtcatcgtatcaccatgtacaagtaccatgtctggtttttctaattgaatcacttgttctaattgagtgattgatttagaagttatctcagaaagtgtctgtcctgatttcataatattcaaatcgtattttggtttgatttcaaaggtacttaatactgaatcaagcatttctctatgctgtgctgtaacaacaacaattggctcgagcattttttcttgttccaaagctttaactaaaggagccatctttatggcttcgggtcttgttccaaatatggtcataatctttttcatcaaactacttatctccgattcttctatttagtaccaaacaatctatctccagcgtcgcctaaccctggtgtgatatatgctttgtcatttagcttttcatcaagtgcagcaatataaatatctacatctggatgtgcttcatgcatcttttctacgccttctggtgctgcaattaaacacatgaagcgaatatttttagcgccacgtttcttcaatgaagtaatagcttcaattgctgatgcgcctgttgctaacataggatcaacaacaatgatttgtctttcagtaatatcttgaggtaacttagcaaaatactctacagcctttaatgtttcgggatctcgatataaaccgatatgtccaactctggctgcaggtactaaacttaaaataccatcagtcatacctaaaccagctcttaaaattggaacgatagctaattttttaccagctaatcgtttagccgtcattttagttacaggcgtttcaatatcaacatcctgaagctctaagtctctagttacttcatatgccatcaacataccaacttcgtctacaagttctctaaattctttagtacctgtatttacatctctaatatagcttagtttgtgttgaattaatggatgatcgaaaacgtgtactttactcataaaaattactcctatctttgtgtatgtttattgatatagaggatattcagctgttaatttcgcaacgcgttctttagcttgttgtaatttttcttcatctttactatttttcaatgctaaactgatgatttttgcaacttcctcaaaagctttttcatcaaatccacgcgttgttgcagcaggtgtacctaaacgtataccactcgttacaaaaggtttttcttgatcgaacggaatggtatttttgttacatgtgataccaactgaatctaaagtctcttcagcttctttaccagtaagtcctatagacccttttacatcaacagctactaagtgattatctgtaccgccagaaacaattctaaatccttcattaattaatgcttctgcaagaacttttgcgtttttaaccacttgttgttgatacgttttgaaattattttctaacgcttctccaaaagcaactgcttttgctgcaataacatgctcaagaggtccaccttgaataccagggaaaattgttttatctatgtcttttttatattcttccttacataaaatcataccaccacgtggtccgcgtaatgttttgtgtgttgtagttgttacaaaatcagcatattctactggatttggatgtaaacctgccgctactaatcctgcaatatgtgccatgtctaccattaacttagcgtttacttcatctgcgatttctttaaactttttgaagtcaattgttcttgaatatgctgatgctcctgccacaataagcttaggcttatgctctaacgctaatttacgaacttcatcataattgattcgttctgtgtctttatctactccatattcaacgaaattgtagaatttaccactaaaattaacaggcgctccatgtgtcaagtgaccaccatgactcaaattcatacctaaaactgtgtcgcccatttctaatgcaactaagtaaacagccatgttcgcttgtgaacctgaatgtggttgaacattgacatgttcagctccaaacaatgctttagcacgatcaattgcgatgctttcagtaacatctacaaactcacagccaccataatatcggcgtcctggatagccttcagcatacttattagtcaacactgaaccttgtgcttccataaccgcttccgatacaaaattttccgatgcgattaactctatgttgctattttgtctctgaaattctctctcgattgcttctgcgataactttatcttgcttggtgatataagacataaaatctccccttctttcaaaaaaacttattggtatttagcacgttcgccaccaatctttttcggcctagatgtggcaatagttacaattgcctgtcctacttgctttactgaggtccttacaggtacacatacatgtttaatatgcatgcctattaacgtttgaccaatatcaattccacaaggaacagtaatatgttcgaccacgatcggatccttcatatgctgaaaagcgtatgttgccaaactccctccagcatgtacatctggaacgacggaaacttcttccattgttaatggattatactgagatttttctattgttatcgctctgttgatatgttcacatccttgaaaagcaaaagtaacgcctgtctctttactcacaacatctaatgcattaaaaatagtttctgcaacttccatcgaaccgacagtccctattttttcgccaatgacttccgatgttgaacatccaattaaacatatatctcctttattaaaaaaggacatatcttttaattcgtctaataacattgtcaaatctttcataaaagcccacccttcctaaaaataaaaaaggaatatagcaaagtgctacactcctctattataacttatttaactgttaacatatactaattatacagaattcctactagcaaataatatcttttaattttaaaattaaacttacaagttcttcataggtatgtacatacatttcttttgttccaccgtatggatctataacttctcctgcttcttttacatattcatgcaatgtgaaaacatgattttgcaaaccaaagtgtgcctctattaattctttgtgcgaatacgacatcgtcaaaataatatctgctttcaaatctgcttcagtaaattgttgcgataaggtcgtttcagctaaatgatgttcttcaactaagtcttcaacataattcgaaacaccttgattgttcacagcgaatatacctcttgattcaaattgatgatttggcataacctcttttgcaatactttccgctaatgggctacgacatgtgttacctgtacaaacgaataaaatcttcatagttcacatcctttaataatgtgattacctgcagcttttaacatgcgattcataattgcttctgtattatcattcagctcaaagccgtatatatacgccgctgaaatattttcattttcatcaagtgaatgtaacacatcataaagattatgacttgcttgtttaacatcattgtcatcctgacataattgaatgaattgcgcttcacttggtataaacgccaccttattactcggcacaataaaagctatagaagaccaatctttaccgtcatttccaattttgctctcaatatctgtaataattgtaagtggtgtattgggtgagtaatgcttatacttcatacctggtgcaattggctgttcagtatcattataatcagcatgggcgatactattcggaagtatttctgtaatcattgctgctgttatagaaccaggtcttgcaattttataaggaaaagatgtgcaatctaaaaccgtactttctaatccttcttcactttgttcagcttgaacaataccatcgatacggccattcaaatcttgatatacatgattgaaagttgttggtgaaggtctaccacttaaattagcacttggagcagctagaggttcatttatgatttgtaataattgtctacctacagaatggcttggcattctaacagcaactgatgataaacctccagaaacttttcgacatagatagcctagctttaacggcaatataaacgaaatagggcccggccagaatgcctgcattaacttttctacgcgtggatccaaagtatatgtaaaatcttttaattgacctttactgtgtatatgaacaataagcggattgtcagatggacggcctttagcttcatatattttagctacagcttcttcatctgtcgcatttgctgcaagtccataaactgtttcagttggtaaacctattaaaccaccgtttaaaacaatgtcttttatttcattaattttaggatattgctgtaaatcttcattatattctctaacatcccaaattttagtatccaacttaatcacgcctttcttatttatcataatataaagcaaaaagctatgcacttaactaatcatagcaaaggcataacttctaattaccatttaaatgagacgattcgatcgtggccatttatatctttaataatgtcgatttttttgtcaggaaatttatttaaaattattgatttaagtgcctcaccttgattgtaaccaatttcaaaaacaactgggctgcctttttccataacgtgaggtaaatcttcaatgattgattcataaatagcatatccatggttatctgcaaacaatgcctgatgtggttcgaatctcgtaaccgttggagacatcgtaaccatatctttttcatctatatatggtggattagatatcaagccgttcaacttgataccttcattaattaagggctttaatgcatcccctgttaaaaattgtatttgtgattgatgcttctcagcattattacgagccatattcattgcttcaagtgaaatatcagtagcaataacatttaaatccggcttttcacatttcaaagtaattgcaagtacaccactacccgttccgatatctacgattgttgcatcatcttctaactgttgtaagaaatgcaacattacttcttcagtttcaggtcttggtatcaaacaatttgagtttacatcaaacgttctaccataaaatgaggcaaagccaactatatactgtataggctctcctaataacatacgttgtaatgctaagtcgaacttcataatcatcgctttcggcatatcatcatgcatgtggactacaaagtccgtacgcgtccattgaaatacatctaacattaaccattcagctcgtgtttgttcaaaccctttttgttgtgttaaatgaattgcttcatctaacttttctttataattcaccattattaagttctttcaatttatctgtctgctctgataaagtcagtgcatctataatttcttctaaatggccttccataatttgccctaatttttgaagcgttagacctatacgatggtctgttacacggctttgtggataattataagttcgaatacgttctgaacgatcaccagtaccgactgctgatttacgttgtgacgcatacttttgttgttcttcttgaactttcatatcgtataaacgtgcttttaacactttcattgctttttcacggttttgaatttgagacttctcagaagatgttgcaatgacaccagttggtaaatgggtaatacgtactgcagagtcagttgtgtttacgtgctgaccacctgcaccacttgaacgatacgtgtcgatttttaaatcttcatttctaatttcaatttctacatcttcaacttctggtaaaactgccactgtagctgttgaagtatgaatacgtccacctgattctgtttcaggcacacgttgaacgcggtgcgcaccattttcaaatttcaatttactatacgcgccattaccagaaactgagaaactaatttctttgtaaccaccatggtcactttcagacgcttctactatttcagttttgaatccttgtgattcagcatactttgaatacatacgcattaaatcaccagcaaaaatcgcagcctcatcaccacctgctgctgctcttatttctacaataacgtctttgtcatcattaggatctttaggaatcaataatattttaagctcttcttcaagatttggaagttcagctttaataccattactctcctcttttaacatttctacttcttctttatcatcagtctcacttaacatttcttcaatatcagctaattcttcttttttagctttatagttacgataaacatctacagttttttgtaaatcagcttgctctttagaatatttacgtaatttatctgaatcatttacaacatctgggtcacttaacagttcatttaactgttcgtatctttcttctacaatatctaattgatcaaacacttataattcctccttattattatcactaggtgctacgatatggtgcgcgcgacaacgtggctcataactttcattggcacctactaagataatcggatcatcgattttagctggtttaccatttattaatcgttgcgttctactagatgaagaaccacaaacagcacaaactgcttgaagtttcgttacttgttcactgacagccatcaatttaggcattggttcgaacggttcgcccctaaaatccatatctaatccagcaacaataacacggtgtccatctgctgatagtttttctactatacttacaatttcatcgtcaaaaaattgcacttcgtctattcctataacatcaacattagttaagtcgtgcgtcataatttcacttgctttagaaatattaatcgcttcaatggcattaccattatgagagaccactttttctttatgatatcgatcatcaatcgccggtttaaatacaacgactttttgtttagcgtatataccccttcttagacgtcttattagttcttcggatttaccgctaaacatactacctgtaatacattctatccaaccggaatggtaagtttcatacattgagagttccacctttttcaaaacataatcgctttattatatcatatttcaaatattcataaatgtctttttcataattatatcgatattgtacatgaacaattattttataaatttgtcttgcatatttatatacagctattctaatttgttgcttcttattcgtgcgatgtttctactcaatacaaactttaataaagggggaaatttatcattatgtattaacaacatggtattgagtcacttctttgaacacagtcgtaagtatatacccttactacgcttataaataaaaaagctgtctacaattccattataggatgcagacagcttaacgattactatattagttgtttgatttaagaccaaactttttgttgaaacgttccacacgtccatccgcagcagcgaatttttgacgtccagtgtagaatggatgtgaatcagatgaaatatctaaacgaataactgggtattcttttccatcttcccactccatcatttctgaagatgtttttgtagaaccgcttaagaatttgaagtttgtagtagtatctaaaaagattacttggtgatactcaggatgaattccttgtttcattattttcagctcctttgccctgaaccatctggaacagagttatttgtgagtttttacccaatactgtgtaattataaaggtaattaattcaaaacgcaagcccctatataatgtttattaaattataggtcgacccgttttagtactttcttctgcagacttttgtagctgcttgaagaaatcttcattattcttagaccttttaagtttgcgaataaatctttcagtaaagtcagttgagtcagtgaatagatttcttaattgccataatgtgtctaattcagatttacttatcaacaattcttctttacgcgttgaacttctgccaatatcaattgcagggaagatacgacgttcagacaatttacgatctaaatgtaactccatgttacctgttcctttaaattcttcgtaaatcatatcgtccatacgtgaacccgtatcaactaatgcagttgcaagtattgttaaacttccacccgcttcaatatttctcgctgcaccgaagaatgcttttggtttgtgtaaagatgcaggatctaaaccacctgataatgtacgaccacttggtggaataactaagttataagcgcgtgctaatctcgttatagaatccattaaaataatgacatcttccccaatttctactaaacgctttgcacgttcaagtaataattcagctactttaacatggtgttctggtggttcgtcaaacgttgaatgaacgacttcagcagcttctactgagcgttctaaatctgttacctcttcaggacgctcgccaactaacaaaataaatagctttgcatctggtttgttcgtactgattgcattcgctatttcttttaataacgatgttttacctgctttaggtggcgccactattaaaccacgttgacctaaaccaatcggtgttactaaatccatgatgcgcgttgaataattttgtatttctgtctctaatttaatacgctcatctggataaagtggtgtcaaagcttggaaatgcggacgtttcttcacttcttctgcgttatggtcattgacaaagtcaacttgtaataagccataatatttttcgttatctttaggttttctaactttcccagttactttatccccacgtttaatttcaaaacgacgaatttggctagcagatatataaatatctttttcccctttagaatagttcactgttcttaaaaaaccataaccatctggttgtatatcatctaagataccttccatataatagttaccatctttttccatttgtgcttccataatagctagaacaagttcttttttatttaatttactatagttcgtcaacttaagagttttagctttttgagtgagttccttggtagtatagttcttgtacaattcgtggaatgattcatactgaggagatgtacgttctctttcaggcatatagtttacacccatttcattattttttagttagtaagtaatagataggcatgacaatgcataaataactgtgctagcacaatcccattatgctaatccccaaccttttaaatacatgaataactatagcaaatttttattttaattacaaaatctatttataaaaattgcaaaattaaaacagtacacaaaacttaattagtcatgtgcactgttttattgcgatttttaattcaaaaatcaaatttatttaaaatatccagctatagatttcacttctaagaactcttcaataccataatcgccccattcacgacctaaaccagattgtttatagccaccaaatggtaaatctggctttctacctgcttcgtttatttctactgtacctgcttcaatagaacgagctactttatgcaatgtttctttgtccttaccaataacatatcctgccaaaccatattttgtatcatttgcaatttgaatcgcttcatctaaatcgttataagtgataactgacattactggcccaaaaatttcttcttgtgctatcgtcatttgattatctacattaataaaaattgtcggacgtgcaaagtatcctttttcaagtccttctggtttaccaggaccaccataaaataattcagcaccttcttcaatacctttattaatataattttgtacttgatcaaattgttttttactaatgatagggcctacttgtgtaccatcttctcttggattaccgacacgcacttggctaaattgttcttttaattcagctaagaatgcatctttaattttgttaggcactaaaacacgtgtaccagctgtacatacttgaccagtattattaacaactttgcctgttgttgctttagccgcttctttaatatctacgtcatctaggacgatatatggtgatttgccaccaagctctaatgatacctttttaaaatctttagcggctttttccataattttagaaccagtagggcctgatcctgtaaatgacatcatgcgtactttaggatgttcagataaaggattcccaacaccagcaccatcaccattaacaaggttaaatacacctttaggaacaccgactttatcaaaaatctcagctaaaataacagctgcaaatggtgtttcttcagatggtttaagtacaactggactaccagccgcaaatgctgctgctaattttaatgatgtttggtttgtagggaagttccacggtgtaattaatccagatacaccgattgcttctttaacaactaaatcatctccgcggcgttcttcaaattcgtagttatctaatgcgtctctcgctgcaacaaaatggtttagtcccatttgataatggacacgctcagataatgataaaggagcacctaattcatccgtaatagcttgtacaatatcgtcttttctgttttcatattcttttacaattttatctaataacgcttgtctttctttcacagatgtatgacggaactctaaataaacatcgtctgccgcctcgacggctttatcaacatcagctttattacctttagcaactttcccgattacttcttcggttgctggatttataacttctatcgtttcattactattactttctacccattcgccattaatgtattgctttgtgtagtctctcattattctttcactcctcaagaatgatttatatattatttatccgtaatgcatacgatataaacattacattccattatgatacgctcccttttaatatgttcaaaataaaatgctttaaaattttgctgcatctatttttttatatttttaaataaaaataactattcccacatcatcgcaaataatgcgaagacttagaaatagttataatcaatgctatgtttaaacgtcatgtaattatttagcagtacgttgatctgttaaatcgacatatgattgcgcccatgcttcaattggatgtaaagcctctgctaacgctttacctttttcagttagcacataaataatttgtactggactcgtagaaatgatttgcttctcaactaactcccattgtgcaagctctgacaacttaagacttaaagcacgtggtgttattgttttcaaatctcttttcatatcggaaaagtgtgctgaacagtcattacatcttgagagataattaatgattaatccattccaacttctaccaagtattttaaaagtttcttcgagatacggacatacttccatcatcttcacctctcatcaataaatttagaatgtaaacgaacaccattttttaatcagtataattattataccacaaaacaagataaatctatacagtttccgtccaaatatctgcacctaaagcttttaagtgttctacaatatctgtataacctctataaatatgtttaacattgtaaattgtagttacaccctcagcaattaaaccagcaataattaaacaagctcctgctcttaaatcgctagcataaacttcagcaccatgtaatgttgatggttttatcgttgctgtgccttcgtcaacttcaatatttgcacccatgcgctttaattcttcaacatgtttaaaacgctccggataaatcgtatcagttacaaatgaaggaccatttgccataaataataatggtgtaataggctgttgcaaatcagtagcaaaacctggatatactagtgttttaatatcaacaaattgatatggcgcattattattgatgcgaattctttcgtctcttacatcaacattcacacctaattcactaaatttagcagttaatgtttctacatgtttcggaacaatattatttaatataacattttctccacatgctgcagcgatacacatatatgtgcctgcttcaattctatcaggtataacttgatactcagaaccatgtaattctttgacgccattgattttaattgttgatgtacccgctcccttaatattagctcccatacttgttaagaagttagcaacatcaactacttccggttctttagcagcattttcaattacagtttgtcctgttgcataaactgcagctagcataatgttaattgttgcacctacgctaaccatatctagaaaaatatgtgcaccttttaactctttagcttcgattttcattgatgtcgtacttgattcatcaatttcagcacctaaagctttaaatcctttaatatgttgatcaattggacgtggcccaagtggacatcctcccggtaaaccaatcacacattttttaaatctacctaacatggcacccatcatatagtatgaagcacgtaatgattcaactttattatttggtaatgcagcattttgtatttcagttgtatcaacttctaattccgtaccatttagtgatgccttaatatttaaatcttctaataaactcactaaagttttaacatcagagatttgcggtaacccttctaatttcacatgtccttgagctaataatgttgcaggaatgatagctacagcactgtttttcgcgccactgatattaacttccccatttagtgtgcgtccacctcttatttttattacctcttgagccatatcatttatctcctttgtccattactttttaattttttgcattattagcattataaattaattttactttatttgtaaaatagtttattttaatcgttaaaatcttgtctttctattttcgattgattaataacaaatcattcacctttactaatatatgctgttcttccccacttgaccatggtctaaagtctgattattcaactaaatattgacgttgttttgacaattatttagttttaattctacggttttcacgtaaacttttttcataaattgctcattttccttataattatatcacaatcaattttgatatattttaccatttttacgctttcattttaaaatcaaactgttttatttattacttatacgacataaaaaagaagcaaacaccattttgtctgcttcttttaaaattaatatccctacgttattaataacttaaagactaaatattaattatttagcgcggttagaagtaccgaactctttaattttacctttaactgtttctttgatggcttcacgtgcaggtcctaagtatttacgaggatcgtaaacttctttgtcgttatttaaaacgtcacgaactgcttttgctgaagcgatttggttttcagtgtttacgttaattttagctgtaccaaatggaattgctttttggatatctttagtcgggataccagtaccaccgtgtaatactaatggtaaacctgtagataaaccgatttcttccatttctttaaatcctaattttggttcacctttgtatggaccatgaactgaacctaatgctggcgctaatgcatcaataccagttttttcaactagttcttgacattctttaggatcagcataaatgatgccgtctgctacaacatcatcttcttgtccaccaacagtacctaattcagcttctacagaaacacctttttcatgagcgtattcaacaacttttttagttgttgctacgttttcttcgaatgggctgtgtgaagcatcgatcattactgatgtgaaaccagcatcgatagcttctttacatttttcaaagcttgaaccatggtctaaatggattgctacaggaatagtgatgtttaagtcatgcattaacccttcaaccattttaacaattgtgtagaaaccgctcatgtaacgagcagcaccttcagaaacacctaaaattacaggtgcattttcttcttgtgacgcttctaaaattgcttgagtgaattctaggttattaatattgtattgacctaccgcataaccattttcttttgcatcaattaacatttctttcattgaaactaaaggcatgaaagttcctccttgagtgcttacgcacgtatttttcaaagtaattatatcaaaaaaatagcgtcaatgcattgaaatactgcagattaaatgtgtattttttgaaaaatgcgatagttatactaaatgcaaacgtatacatttttatacaatttaagccgttgcataatatgtagtcattaattacaatattttataagtagattggaggataaagatgtcaaaaatcttaaacacacaactaataggtatctttaataggctagaaaaacaatctttagaaattcaaatggccgcccaatgtttaattcaagcaattggtggcgaaggttatgtttatgtaaaaggttatgatgatttacagtttttcgaaagtttcattctacatagtgatgagcgtttaaaatctagccgaaaacttgacgctattaaagactttaaagaaattgactcaactgatcgtgtattattattcgcaccattttataatgatcaagttgcattagatattcaaaaacttatcgacttagatatcgatgtggtcttaataagcaacaaacctaaaacagatgatttccctgatcatctcgtacattttatcgatttatctacaccaagacctatagtctacactgaagattacgataagattgtccaaccacatgcgatggcattgaattatgtatactatgacatttatacacaaatgattgaaatgacaagagacttagaattataaaagtcactattgttatttcataccttgtcactaacataatattaaaattatacgaaaaaccggtactttcaatgtttaacaatgaaagtaccggttttattagcaaatttatttattttgttgatattttaatgaagcttcaataaatgatttaaaaatcgggtgcggacgatttggtctagataagaattctgggtggaattgacaagcaataaagaaatcatttgtcggaatctctaccatttctactaaacgtccatctggacttgtaccagaaatcaccataccatttgcttctaattgttctctatagtcattattaaattcataacgatgacgatgtctttcttcaatttccgctttaccataaacatcttgtgccaatgtgccttctttaattgaacatgaatataagcctaagcgtaatgtaccacctaaatcttcgatatctttttgttctggtaataaatctataattgggtatggtgttgctgggtctaattcagctgaatgtgcgccttcaaggcctaatacgtttcttgaaaattcaactgttgcaagttgcattcctaaacaaataccaaagaatggtacattgttttctctagcatacttaattgcactaattttaccttcacttgcacggaaaccaaatccacctggtactaaaataccgtcgacatctgcaaggtattcggctgcattttcatctgttacttcacttgaatcaatccatctaatgtcaatatctttggcaaaaggatatccagcatgtttcaatgattcaacaactgataaatatgcatcttgtaagctaacatatttacctactaaaccaattgtaattttaccatctaaattattaacgatatctaacaactgtttccattcatcaagctgtgtttcatatttcgcgtttaattgtaaacgtttaataacgatatcatccatattttgttggcttaattgtaatggaatttcgtataaagagtctgcatcacgacattcaataacactttctttattaatgtcacagaataatgcaattttatcttttaaatcttgtgtcatttcatattcagttcttacaacgattaagtctggttgaatacctaagcctcgtaattctttaacactatgttgtgttggcttcgttttcatttctccagcagctttaatataaggcagtaatgtacagtgaacatacataacattttctctacctaaatcgctacgaatttgacgaatcgcttcaataaacggtaatgactcaatatcacctgttgtaccgccaatttcagtgataacaacgtctgcattcgtactttcccctgcaagtaataaacgttctttaatttcatttgtaatatgcggaataacttgaactgttccgcctaagtaatcaccacgacgttcttttttcaatacgtgtgaatacactttaccggctgtcacatttgaaaacttgtttaaattaatatcaataaatctttcgtaatgtcctaagtctaggtcagtttctgcaccatcatccgttacgaatacttcaccatgttgataaggactcattgtacctgggtcaacatttaagtatggatcgaatttttgaattgttacatttagacctctatcttttaataatctacctagagaagatgctgtaatacccttccctaatgatgaaactacgccacctgttacaaaaataaattttgtcatgtcttgacctcctaattattaaagggaatgcttcctcatcaattgtaaaaattacgtaaaacataacattaaagcaagctcattcaagttgtttatttgtcgaattcgacaaaattaaattctgtttacttaccgtttccatactgctatgtcactatgtatatcatttacaactttgatttttgcgttatcatttcttgatttactcaattaaataaaaaaacgctccctctcacaaattctgtaaggggagcgtataaattttatacacgtgtcctatttaaaggagcccgaataaaattttatcatctttcaactaaaagtcaaacaaaaaattaatcgttgaagtcttcttcgtcttcaaacacttcttcgtcttcgtctagttcatcttcatcttcttcaatgactatatccgaatgattgatttcttcttcaacctgctcatcttctggatcatttagttcttcttgatcatctgtttgagctggaatatcatcgtcgtcatccatttcatcttcgcccaataattttaagttttgatcttcttcatcatctgcatccagaatatcgaatttttgaatagttggtgcgattttctcttcaatatcatctaccgaataccaatcacgtaatccccataaattttctccaacatttaaaaaacgaccatctgtgtttaaatccgtgtaaaattgtacaacacgattttcaatttcttcgtactcataatcacctaacgctctaaattcatcgatgatatcatataagttcattgtttcgcctttatcattcaataatgtataagccatatcaataaatgatttttcatcaaccatttgttttgtataatcttgaattttcattgcccaatacttcctttcgaaggatataatctaaatttatacgtctgaattcatttatatatagtaacaaaactaaattataaatgacaatatcatatttcgcaatcactgttagtaatttaaatatttttcgaaaacgacataatcatcagtttgttcgatttcaacgaaattactatttaaacataatggtttaaaatcattattctctccaaacagaatcatcgtaatcacattaaggttgtcatagttttttcttaagtaagttggcaattgtcgcagagcacttgaaccaataccattaaagcgatatgatttatccacttcaatagcagcaatgttcatgcgttcaccaatctgctccaatgcgataaagccaaccttttggccatcaatcattaaattaatgatatgtacattggtcacttctgaacgactttcttcttcaagctttaatgatgaaacatgttttgaatctaagtccaagtaatatagtcgttctttgccaattggtccttcttctttagtcgctgtatgcatgaatccagcacgttcgtataggttccaagcattgtcattttccgcatctactactagatatagatgattaaaatcaggaaatacaccttgaacatattgcggcaatgacatcattattttcgtgccatatccaaaaccttgatatttttcattaatcgataatgaacgaatataaacgacattttcaggtgtatcataaccttcatgctgatagtaacgatgtaatacaaaaaagcccaccacttcatttttatcgtttattgctacgttagcaatcctatcagcatcattaattgcatcatcaataacttctttaggtaaagatgaatatatttgttgtctttcattcaagtcaaaatcattaattgctgaacgatattgttcatcaaatgcttttaaagtgataccttcaaaacaaagttctttagccatatatttaacccctatctttttatatatgaagcatgaatccccatattattttacctattatttcactacgataccattatttgctctaagttaaataaattacttatttatattttttaaatttcaaaattaatgtactattcctcattacttatcattttaatcagagacttacaaatacactgcgtacgaactacttttaatattgcgtcactaactaacaatcctatacaacttcaaaattcctagaaaataatatatataacttaacgtccacgtttgtaaaacattaattgcgatacgcttacaatgttgaaatgcaatggcatcaaatttgttaataattactattattacttgttttttagtcattttactatactattatttaaggatagacattaataatgaggtgggaatcttatgaaagttggcattgacgctggcggtacactaattaaaatcgttcaagagcaagataaccaacgtacttttaaaactgaattaactaaaaatattgatcaagttgtggaatggttaaaccaacagcaaattgaaaaattatgcttaactggaggtaatgcaggtgtcattgctgaaaacatcaacattcctgcacaaatttttgtagagtttgatgctgcatctcaaggactaggtattttgttaaaagagcaaggccatgacttagcagattatatttttgcaaatgttggtaccggtacgtcactacattatttcgacggccaatcacaacgtcgtgtaggcggtatcggtacaggtggaggcatgattcaaggactcggttatttactaagtcaaatcactgattataaacagttaactgacatggcacaacacggtgatcgtaacactatcgatttaaaggttagacatatttataaagataccgaaccacccattcccggtgatttaacagcagctaattttggtcatgtactacatcatttagatgctgattttacacctagcaataaattagcagccgttattggtgtcgttggcgaagttgttacgacaatggccattactgttgcacgtgaatttaaaactgaaaatatcgtttatatcggttcttcatttcataataacgctttattacgcaaagttgtggaagattatactgtgttacgcggttgcaaaccgtactatgttgaaaacggcgcattttcaggtgctattggtgcattatatttagaaaaatagaaaaagaccatttatatgcgcgttgttttaaataaacgctatataaatggccttttattttatggtctaagtgttttgaatacgtattgttccatttattatcacttaattacttacaactcaattcaattaaaatgtaagttcattagacaatttttgcgctgaaacaattgtaccaaccacgccagtttttaaatctatcgcaacggctttatgatcatctctaagttcatctagccattctccgaaaacagaaccttcaatcgtaattaaatcacactcttcaaaatcttcatctcgaacttttaacgctctgtttttaatactccatacaggcataatatgcggctttttttcgtcgctatcattttcactaatgagaataaactgcttactaccttttttagttaagccgtatacttcatcatatttcgctacatcttggacaaattctttgattctaattttatctaattccgtcatcacttcttgtgtaacagctacaacgtttagtagatgcccttcttcttccattgtttgattcataataatatggtcttgttcatcaaacaattcatctaattcataagtagcaaaacgatcaacgtccatttttacaactttatcaaatggaatatcacgacttgttaaaaatgatacggccacactttcttctgtccaaacgcctacatacgcttcacttttataatttaggcgtactagttttttatttttagaggcgaaataaatacattcatttattaatatatctctaaagaatggatatgctttataagacatgcttgaccctcactttttaaaatatgtcatacataaaatagtaaatgactccaacaagttagtcaattagacatattatgaattcaatttaatgtcatgtttttcattttaaaaattcaatagcattaaattttacgtatacacaaattcggtctataacacgaaacatatctagttactaaaaatttcaaaacgataacctttagtatacctttatcaacaaaatggcaactcttataacatagtgaaataaaagtcgccatttaatattagtattacaaagtattgccatatcataaatttaattactgttgactagaatcgaaaaaagcttgttacaaacgcatattcagtcaactactggcaacacaacattgtagcgccttatgttccgaactctaatagtgttcaagttcagctaaaaatgcgcgttcattctccagtactgtttcttttgaatcaccatgccaaatacagccaaaccttgatttaactttatcttcaccgtaccaatcaccatcataataagataacgggtataaactaccttctttgacatatttcaaaatcgtattgaagaaatgtgtgttatcaccttttgaatgataactataaaacttttgatatcctgaattcaactcgttagcaagtaataacatgctcgttgaaccattttgtctaaagtttaaatcaatcgcataaacgttatcatcctcatcgacgagtaggtcaaaaccagctacaccaaagaatccttgattcacaccgttttccataatttgtctacctgcttctataacgtgctctggtacattagtagtattttcatttccgttataaaatccgtacttatccgttaattgcgttgccgcaccaagatattgaatgcctagcgattccgagtatgcaaactgaacgcaataattcgctttttcttcaatcttctgttcgataataagcgaattcgtttcagcagttgcctctttaatacgcgttatcgctttttgtaaatctgcatcatgataacaaatcataacgccatagccacctgctgtcggaagatcatctcccggcttaattactaacgggaattcccaattcttaatctcgttttcgaattgctcaatttttacaacttttctttttggtaaaaacttcccatttgtccattcaggtattcttgctttattatttaaagcaacaaataacgttttatctaatgcataatattgctgattcaagattgtttcatcatgaatatattgaaaataaatctttttattttccttatgtgccaattgtttgatcaagttttcgtaagattgctgattgttaaatgtataaattgagttcggtacttccttaccaataacttgaaatagctgatgcaatttgtctgtcgcactagcttcgtgaacaataacaggtaattgatttgctattaataactccctaccagttaaaaaattagattgatgttcgtccggtttcaaccatggattcgatatatacgaaggtcttgacgtatagacaacatctttgtcatataaatcacttaacgttaagttcggctcattaccattatttgtcattacttcccattccctttcaaatgcgcatgctcttcaataatgtcttgataaacgtcttgatttgtaattaactctaaccccatcaacgccattattttagcgcctttaattaatgcttcatcaccatgtacactcgcagccgcttctctaaatctatgcgtatgtcctactaaattacgtgatcctattttaatatgaggatgtattgttggcacaacatgacttacgttccctgtatccgtagagccataaccaaaatcatcatcaataactgcttcaccaacttcttcagcatatttagcaaataaatcatctaatttcggcgttttaatgaattcattcacaccgttttgaattcgaccaaattcataatcacaaccagtctgtatcgcagctccacgtgcgatttgatttactttttctgttaatatatccaattctttacgcgtcattgctctagtataaaaacgagcatgtgtatagtctggaataatattagctgctttcccgccatctaaaatcacaccatgcacacgttgatcttttttaatatgttgtcgtagttgtgctacaccattaaaataactaatcatagcgtctaatgcatttaacgcttcatctgcattttcagaggcatgagcactttttccgtaaaatttaacatctaaaacatccactgccaaagtatcaatcgttttataagtttcatttcccggatgaatcattaaggcaatgtctatttgatcaatcacaccagccttgacataagaagctttagcgctaccattttccccaccttcttcagctggacatccaagaacgactactttaccaccaatttggtcaatcacttgcttcaaaccaattgcaccaagaacacttgcagttccaatgatattatgaccacaagcatgacccaatcctggcaaagcatcgtattctgctaaaaaacctatagctggcccgtcaagtcctgaatcatatgtcgctataaacccagttgcatgcccagcaatctcggtttcaatttcaaaatcatgctctttcaaacgatctattaaagttcgagacgcaaatatttcttcattaccaagttcaggacgttcatgaattctatgactgatttcgatataactatatttatttgtttctatataatcgagaatttgttgtttttcactcattttttactatctcccttttaccctacactcattttaatcatccacaatattttgttctttcaaaatgaattattacttattctatcggttttatctcatgatgtcatctagtttttctttatttacaaaattttctaataactaaaagcctttcataaatttataaaacagtttcaaattgtaaaacataagccctattgttacaatttaagtattgttagaaacacaacttacaacaaacttaagttttataatgcaacaaatcataagcgttttatagttttgagtagttaataggaggaaattcaaaatgacaaaaatgaatgttgaaagtttcaatttagatcatactaaggtggttgccccatttattagattagcgggaacgatggaaggattaaacggagatgtcattcacaaatacgacattcgtttcaaacaaccaaacaaagaacatatggatatgcccggactacattcattagaacatttaatggctgaaaatattagaaatcatagtgacaaagttgttgatttaagtcctatgggttgccaaactggtttctatgtatcatttattaatcatgataattatgatgatgtattaaatattgttgaagcaactttaaatgatgtgctaaatgctactgaagtgcctgcttgtaatgaagtacaatgtggctgggcagcaagtcattcattagaaggtgctaaaactatcgctcaagcatttctagacaaacgaaacgaatggcatgatgttttcggtacaggaaaataaatcttagtcaatcaagttaatcagaaaagcagtcgaacaatgattttacaatcgccattgtccaactgctttttattatgcttcaaagtcaaaaaatcgaacaaatgaaaaagtaaaatctttaacatttgtccgatttatttgagaaccactataatttcttaattagtcccattaacacgaactgcataggtaaccttaaatatagttgccatgttggcaattgtttatctcctaaaggtaactttttaactgccatatagatattagctgggaatacagctagcaagaatagattgattgtatttttcaagcattgagatggtcttttaattaaaagtgcaagtccaaataatatctcaaagattcctgtaacaagaaccgctgtttttcgaagtggcaaacatttcggtatgatatttctaaattgtcgttctcgtgtaaaatgcaatacacctattacactaaaacctattcctaataaatatcttagtatgttcaatcagcttcaactcctattctgtaatgattttatgaattaatgtaggcgatacaacatgatcagcaattgttatgcttgaatctaattttttaacaacatcgtctacatcttggcgattactgtgaatcgttaataatgattctccttcttctactttatcaccaatttttttatttaaaacaataccaaccgctaaatcaatatcatcctcttttgttaaacgtcccgctcctaacatcatcgaagcgacacctatatcgttagagactaattcagtcacataacctgattttttagctttatattcaatttgatattgagcttgtggcaaacgctctggatggtcaataacagtttcgtcgccaccttggtttttaataaatgttttgaatttttctaatgctgcacctgaattaattgcctcaattagcaacgctctcgcttcttcaagcgtttcagctttgtttgcaagtacaaccatttgagaacctaatgttaatacaagttctgttaaatctttcggaccttgtcctttcaacgtatcaattgcttcttgtaactcaagcgcattgccaatcgcacgtccaagtggctgattcatatcagaaataatcgccatcgtattacgtcccacattattaccaatacgtaccattgcgtgcgctaatgcttcagcatcttctaatgttttcataaatgcaccgctaccagtttttacatctaatacaattgcatctgcaccagcagcaatctttttactcataattgaagaggcaattaatggtattgaattgacagtaccagtaacatcccttaaggcatataattttttgtctgcaggagttaaatttcctgattgtcctacaactgccactttattttcattaaccaatttcacaaatgttgcttcatctatttcaacatgaaaaccatcaattgcttctaatttatcaatcgtaccacctgtatgacctaatccacgcccactcatttttgcaacaggaacatctacagctgctactaatggtgctaaaaccaatgtagttgtatctcctacaccacctgttgagtgcttatctactttgacacctttaatatcactcaaatctatcatatcaccagaattaaccatagccatcgttaatgctgcacgctcatcatcattcatatcttggaaataaatcgccattgctaaacttgatgcttggtaatcaggaatatcccctttaacatagccgccaataaagaaattaatttcttccgttgttagtgtatgaccgtcacgctttttctcaataatgtctatcattctcatttttatcatccttttcttaaaaagcttaggacaaagcatctgcgctttctctagtccatttttaaaagcacaagcgaaaattattatagcaagctatcgatttcatttttaatatcacaatttcaatgcgatgttattattcttaaatagattggttataacgttaaagtccctattaaattatcttagaatcatcatggcatttatgatgtcttaaagctgatatcgacatacttatatatggttacgatgtcccatgcttacatatttttataaaattagtaatctgaatctgcttctaaaccttgcataatttgaacgcctgcgctcgcaccaatacgtgtcgcacctgcttcaaccattttattgaaatcttctaaattacgtacgccacctgatgcttttacttctatatcagcacctactgtatctttcattaatttaacgtcttctgcagtcgcaccgccacctgcaaaacctgttgaagttttaacgaagtccgcaccagccgcttttgttaattcactcgcttttacaatttcgtcatggtccaacaataccgtctcaataatcacttttactgtgtgacctttcgcagctttcaccactgcttcaatgtcttgttgtacatcatcaaaacgtccatcttttaatgcgccgatgttgatgaccatgtcaatttcatctgcaccattttgaatcgcatcttctgtttcaaatgctttcgtcgcagttgtcgatgcacctaatgggaatcctattaccgtacaaactaacacctctgaatcagctagtcgctctgctgcatatttaacatgcgttggattcacacatacagatttaaaatggtatgctttcgcttcatcgatgatttgatcgatttgcgtacgtgttgactcaggcttcaataaagtgtgatcaatcaattttgcactattcattttctatctcctcctttatggttgattataaaaatacggttgtaaattagttgattgagcgtcaggttcatttaaatatcaggttagatgttcgctttttatgtaaccgcatacatatactattacattaattcatttcccataaacaaacaatacaattgaacgtgatatcttcattatgaacgatgacttgacaacaagctaatcaggattatatttttataattctttaattctatagtacaaaaattcgcaaaaaagggaaacaaatgttatcttaaaattattaatgaatattaaggagaagataacaaatgacaaaaggtacaccacatattcaaccaaatggagtaaaaattgctaaaacagtattaatgcctggcgatccgctacgtgcaaaatatattgctgataattttttagaaaatgttgaacaatttaacgatgtacgtaacatgtttggttacactggtacatataaaggtaaagaagtttctgtaatgggttctggtatgggtattccaagtattggtatttactcatatgagttatacaacttctttgatgtagatacaatcattcgtatcggttcttgtggcgcattacaagaaaatgttaacttatacgatgttattattgcacaagctgcatcaactaattcaaattatgtagatcaatacaatattccaggtcatttcgcgcctatcgctgacttcgagttagtaactaaagctaaaaatgtcgctgaccaaatcggtgctactacacacgtaggtaacgtattatcttctgatacattttacaatgccgatccaacattcaatgatgcttggaaaaaaatgggtattttaggtatcgaaatggaatcagctggtttatatttaaatgcgattcatgctggtaaaaaagcacttggtattttcacagtaagtgatcatattttacgtgacgaagctactacacctgaagaacgtcaaaattcatttacacaaatgatggaaatcgctttagaaatcgcagagtaacttatttaaattgactttaattgctctttaacaatgcgattaaactcaaaaagccaacacattctgggcgtatccccatttatgtgttggcttttatttatattattacttatctgtagattagcttaagtaagatttaaacatccaattatgtttatctactgatgtttgcatacctataaacatatcttctgatacatcatcgccagcattaccagcaatttcgattgcgttttctaattgttttgagatatttgtgaagtcttgtgataattcttcaaccatttgttctgcagagtaacctttcgcagcttctttaacaattgattgctctaagcattcagttaatgtacctacagggtttcctcctaccgctaaaattctttcagctaattcgtctacatattggcttgcttcattatataattcttcaaatttaacgtgtaatgagaagaagttaggccctttcacataccagtggaaattgtgtagctttgtgtaagctactgtccagtttgctacttgttgattcaattcttttacaacatcttgttgattactcatatttaatacactccttaaaattgtctacgtcttgcttgtttatattaattattatattataataattctaatctgtaaagtgtttttactctcttttttataattattctaatctaatcgtaaagtgttccgctatttaaatgcctaaattttaattcatcatctaatatatccattatcaattagcaagtatgttttatcaatcagtaagttttactttcgcattatcatctaaaaagaacgatttttcataatcatttggttggtgccatgttgttttccacattctatttctattattagcaaacattcgataaccgaaattacggactggtttaggtacaagccataaacctacgcccaataatttagttcgattaggtagtgctgtgattagtttaataatcgcctgcgattcaaaatatatacgatcacctttctgtaaaatcacactatttttatttgccgcttctggatgttgtttaaaaaattgttggccaacttcaccttttaacgtggcaaattgataatttcttggtaggtcatgttgaattaaccaaatgacatagttataacaatatatacagtttccatcataatatacgattggcataatttattcgctcctttaatagtacttatagtcatttttcctaatttaaaaacatttaaacaaggttgtcacttgataagtcctcgcgacacgaaattgccataaaatttatttttcagttttatatttattgtataatgtattttttatttactttaaatttctcaatctacagtgtaatcttatttcttattattaacttagcgtttggtcattcgtcttattcaacataccactggaaaactcatataaagttttaattctgtaacataaattcttttatattcatatactgtctttattatttattaaaataaaaacgagtaatctatcataagctcttaattagctcttatggttgattacccgtcattttttctttatgcggttattcaaatatgcaattatgcaatttttaatcctatccttacttcttttcaaaaactaccatatatcattagtcatgtttgactttgactatacgtgtgtattttaaaaactgctctgaatatttctccttaatttcctctaaactgtcatatgtaatacctacaatatgccaattaggattgaaataatagaaagaatctttttgtcgtgaccatttaatcatattaccgtctttattataacgtggtaatgttacttcatagccttctaacacattaatatacgtttggaaaatgtctgtatctatacgattaaaattatcaataactaaataacttttatcctttttaggcattaattgagtaataaacccttcacgatagtataatgcccctgtttcatttggtaaatacttgccataaagcatatcttctgaaaaatcaggatgacctgttgttataacaggatttgcattcgctttttgcaataagtcattagccgcttttaagccttcttcttttcgatctacaacaagtaaaataaatggctttaacgcttcttctttttcactttcaagcatatctggtttttgaaccatttcaaatggagatttcaatccattattatcgctcatttcaataattgcatcatactgtgcttgtgacatacttgcaatagcctgttttgcattttcttgaaggaaatataagtttttcaatttaggatgcttatttaatgtacttaatgtaatcggtgtaatgtctttctcataagacacttcaatcactgtactatttgttctaccaggaattggtggtttttcatgaatatgctttgatacttctccaattccaacgacagattgatttttcgttcgattataaaaaataatattgtcgccttcttctaactgagtataaaaatgataaccattacgtttaataccgttgtacgtgtgcgtataaatcgtatattggtttccaggttcaaattcttcagtttcagctaaaaagaaataacgcggtatcttaatttcgcctttaccaagaccacttattaaatcaaactcttctgcagtgatttgattgaacaatgtctctttcatattacttatacgaaattccaaagcttcactacgctttaaataatctgctgttaatggtttcaattgttcattaaaacgaaactgtacacgtattttattttgtgcacctgtttcaacactaataatttcaccacatccaagtagtccagtatccgtctgaacttgataaaagatgacttgatctcctactttagcctttttaaacgctctaaatccttgagatgggttaaaatgtgcgcctgattcaaataaagctgtttgtcctactaacggttcattatgattccaacggttatatccacaattcaaccaaaaataattcgtttctgctgtcatcttaatactccttaacctgaataaattttagaaacactatgaattacattcttttagtgtttcttatgcagttggacgcgtatgcgaacaactgtataccctttgttcactgcgattttaatcgcatttcctataacattgtagcgcccaggacattaatttacgtcccagacccttatcgttttcacttctaagtaagtcgaactattttgctttacaacaagtgcgactctaaatacagttggacacacatacgagcaactgtataccttttaatcagttttctatattttatttattatatctgtcttaatgataaaaattgttacaaacagtttaacatatttagctacctattttgcatataaaaaacatgcttgcatacactatgcaataaaaattacaaatttatatatgataccactatgcttgcttatctctatagcgccattgatacacatttttaaatatctatactgccgttagaattttatcatgtcttaattttcattaaatattaattacttcattttatataaaccaacaaaaaccccctcactactatgcaagtgagaggttatgttgatgtgctttattttcatcaatgtcattaacacaatcatatttcttctgttaatgcactgtattatattcaaacgcgctatcgacaattaatttgaagctacaaaggtaccgcataatggcagcacattaattaacaatgcgctaaactttaatgaggcgctgatttgcttgtctttaaaagtcaacatagcactgataattcctaaaatagctactatacgtggaattgtcatgctcggatactgcggtatatgtaagaaagcaccaagacctgctatcacaccacatactaacgcaatatatagaaattgcttcaaatcattcactcctaaattgttattacactattacacatagctaatcatcaatgtgaaatcaccttcaaagacactatccaaatcttcagaagtcaaaataaagtttgtaccagtagtcagtttgaaaatttcaccatcgacaatcatttgcccttcgccttccaacactgtaactaaacagaactctctaggcttcatataatttaacgtgccagaaatttcccatttaaccaatgtaaagaaatcattcgatacaatgtgtgtacacttatggttttcaataatttcgctttcaggcaaaatattaggtaatggtgcattgtactgaataacgtctaaagctttttcaatatttaacggtctatcattatattgattatcttgacgattgaaatcataaagtctatatgtaatgtctgacgattgcatcgtttcgtatgctaatattcctgaagaaatagtatgtactgttcctgctggaataaaatagaattctccaggttttactttaatatatctaagtatcgactctatcgttccgtgttgaacatgattcgcaacttcttctctagactctgctaatgtccctataactatttctgcatcttcttctgcatctataatataccaacattcagatttgccatattgcccgttttcatgctcataagcataagaattatcagggtgcacatgaatagaaagtgattctcttgcatccactattttagttagaagcggaaaatctttgcttgggaaatcaccaaacaattcacgatgttctgaccaaatacggtctaatgtttgaccttgatatggtccattaataatctcgctcgtaccatttggatgtgctgacacacaccaacattcccccagttgtatcattgtctaattgatatccaaactcacttagacgttgaccgccccataattttgtttttaaaattggttgtaaaaataatggcattgttgcacctccattgtgattaagtaagcaatagaactctgatgttgttgttccattatattttgattttgttctcatttacatcgtattattaacttccacatttcaaattaactattagtgattgtaccatatttactaacattgcagtactgccaattaaagcgcttcacttaaatttacagtactttaacattttcaaaaatttatagcatagagattatatctctcttacatttgtacatatttccctttaaatttactcgcccattataccaattaataaacaactttaatagttgtgccatacattgttcaaattctttgtaaaacgcatagacaatacgtacttattcatacttataattcatcattttcaaaaaataacgagttacgaaaaagtaacccgcttcaaatcatatttactatccttattaatccgtttcattttcaaattgagttaaagcatctttaatgtcctgatcaccactaataatttgaaactcttggtgattaaaatgattggatgtgacaatttcttttaatactgtcgcaacatcttctctaggaatttcacctttaccatcaaaatattgtgcagcttctatctttccagatcctgctgcatttgtaagtgcccctggatgtaaaattgtataattcaaacctgaacgtcttaaatagtcatcagcgtaatgtttagctattgtatatggctttaaatcaccgctatcatcaaaagcctgacgtctcgaatcatatgttgaaaccatgacatagtgtttaatattggcctctttactcgcaatcattgatttaacagcaccatctaaatcgacaataattgttttatctgcacccgtgttccctccagaacctactgaaaagataactttatcgaatggtttaaacgtctcagttaaagtctctattgaatcattttcaacatcaacaagaattgctttcataccttgtgattttaacgcattaagttgatctgattgcctaacaccagcagtaaatggtacattttcttttgctaattgttgcactagtaacgaacctacaccgccattagcacctataaccaaaatattcatttacaacactctcctatttattattctctatgccataccactttatgagatatgtaaaacttgttacaactataaaaatcaattgacatactactgggaacgtattaaattaatatatgaacaaatattcatatgaaaggattgtcatataatgtcagaacaatattcagaaataaatacagatacattagaacgcgtaactgaaattttcaaggcattaggcgattacaatcgaatacgtatcatggaattgttatcagtcagcgaagcaagtgttggtcacatttcacatcaattgaatttatctcaatcaaatgtctcgcaccaattaaaattacttaaaagtgtgcatcttgtgaaagcaaaacgacaaggccaatcaatgatttattcattagatgacatccacgtagcaactatgttaaagcaagccatacatcacgcgaatcatcctaaagaaagtgggttataatatgtctcattcacatcatcatcatgaccatatgcatagtcatgtaactacaaataataagaaagtattgtttatatcgtttttaataatcggtctatatatgtttatcgaaatcatcggcggtctccttgctaacagcttggcattactatctgacggtatccatatgtttagcgacacattctcattaggtgttgcacttgtcgcatttatttatgctgaaaagaatgccacaactacaaaaacatttggttataaacgtttcgaagtactcgcagcgttatttaacggtgtaacgctttttgtaataagtattttgattgtttttgaagcgattaaacgtttctttgttccttctgaagttcaatcaaaagaaatgttaatcattagtattatcggtttaattgtcaatatcgttgttgcattctttatgtttaaaggcggcgacacttcacacaatttaaatatgcgtggtgcttttctacatgttatcggagacttattaggttcagttggcgccattactgcagctattttaatttgggcatttggatggacaatcgccgatcctatcgcaagtattttagtttccgttattattttaaaaagtgcttggggtatcacaaaatcttcaattaacattttaatggaaggcacaccaagtgatgttgatatagatgaagttataactactattaaaaaggattcacgaatacaaagtgtgcatgattgccatgtttggacaatttcaaatgatatgaatgcattgagttgtcatgttgttgtagaccatacattgacaatgaaagaatgtgaattattattagaaaacattgagcatgatttattacatttaaatattcaccatatgactattcaattagaaacgcctaatcacaaacatgatgaatcgattatatgttcaggaacacatagtcattcacataaccatcatgctcatcatcacgcgcatgtacattaataattttaacctactgccattgcatcgattaaacttttcaatggcagtaggttttttatgtctttatggcgacttgtttggtctttgatgatgcaatgtttattaacaaattttcaactattatttcttacattagtcatatttttgacaatttactattataattctctaactttagtcactttaattaatttttattagatattaatatgaaaataacgtgttttttgttattgtatttatatgaagaaaaggaggcaccactttgtttacttactttaaatcagcatttaaaaatgctaaaccacaattattaataacattgatatatgcacttatagcatttgctgtaattgcagttgtatatttacttgctaatttccagcttgctaagtatgcacaaactattgcaatttattcacaatttgggcaaaaaccaccagtagatgcatatttaaaagttatcgctgtattacttatagcagctgtagtttcactgtttgttttagttcaaatttttatcggaattacaaatgttatgaaacgagcaatgagtcatgaaaaagtaaaatttaccgatttatttattgcatttaaaaaaggtaattatttaaagagcgttctgatcggtcttgtatctatagcaatgattatcgttctttcacttctgacatcattactatacaaattattttctccagtatcagaaatgattatgaattcagtacaatcatcatatgcagatagtacacacctgattggtattgctattacaactcaaagcatcataatcattgttgttttattgattaaagcaattattacttggttattgttaatacctattttcaactttatgactagtttcgttgaatcaactaacgataaagtaaaaacacacttagctaatggatttaaagcaatgaaaaatggtcaaaaaacatttttcaaatttttcattggaatactattattaaacttaattattattttatttaaaacacctgttggttacttgatttcatttaatacgcaatcactctctcaaagtgttgcagaaaatatcataagagtttatacagtaatgacaattattttattcgttgttattcatgcaatcattttaatgggtatcgttcaatattacttaaaacgtggtcaaaaaattactaaagataaagtaaaaacagctgacaagaataaaaaagttgtcactgaaccaaaaaatacaaaagtagaaaatgataaagtgacaacatctgttgaaacaaaaacagaaaaagcacaagattcattaaatgataatacaacaaaaacaatgacttcagataaaccagaagacaatcaaccaaaataaattttagagccccttacaactttagttgttaggggctcttatgcagttgatgcgtagcatccaactgtgttcctctatttttcaactttagttgttaggggcttctttctaaaataactaagtgaattatctatatatgaagaggtctccaatactttttatataattcgtgattacattctatacttttaattgtattttctgctgtatggaaagttggttttattaattctgattatgttcagaactacaattcataagaaaaatgtgttaaaatatatttgtagcaagtagaagcaaaagatgaaaatcattaactcttgaaacacaaaaagggcaacactcggaaacatgttaccctaatgagcccgttaaaaagacggtgaccttatattttatttaaaaatagccttcaaaaatgccggtcaaagcgaatagaaggttattttttatggtcttgagtactaatcaatactaaaccaatgattgttaatacaaccataagcatttcaaaatcagacatgctagtcctttctaggagtaacaactataaccataggcatcacccctttattaagagattagccaccatctatccaacttgctcaataaatattataacatgcacacttttaaacagtaattcatagtataagttttttcatttcttaatcaactcgataaacagttgagtgacatacccttgtctaactagctatttcttcccctgttatcgtttgttcatcatataaaaatttaatttctcattttttattctctggtaaagaggggcgcccgctttttcggcctctcgctcttgttgctgctaagtctattttatacactcacatagtaaattaacttctaatcctgaaaaatgcactcatcatcgtaaaaaacattttgcccattgtgtctttcgttgaaatgttcatgttactaatttgtaagtcaattccgttatcatcgaatcattgtgataattcaattaatagttttgtcgttctacctaaccgatcaagttgatagacaactaatgtgtcgctctctcgtaaataatctaaacacttaacaagctctgtacgtttgacaccacttattctttcactatatacacacccacacccaaattctttaagtgtatcgatattaatctttcgttgatacacgatcataaccaattttagccatttaaataaaacctctcttcaacatattatatttagttatgactcaaaactcattgccgtatttttgattttgtattaatatatcaaggctatcatcatctaataccaaatgaatttctccacttcgaatatcaatagcaacgtttatttttgattctaactttttcaaataatctatgtcagtaaatatgtacttagaaagataatcatcttcttttttaaattcttctttatcaattgtatatccgttctctaaaatttttgataactctataagagtattactcctactttctttttttacattagacactacatagtttatgaacttttcaatcaattgttcttccaaatcactataatcttgtgtgtcctttttaaataattcaaacataatattattggataaattttcattatatattaatcgctcgtacataccagaagcgctagagttgataaatctattcagatcgttttgtatttcgttcaaatctatattccctttactatcgtaatatgaataattactcattaatttttttaagaaatctctcaaaccaaagtaaagataaatatttgaatactttctggcattatcgtagtcttttacatctcttttatagtgatctatcaacatattcaattcgaaattatatccatgattaaaatcaaactcgccattgtcatattttctttgaaattcaaacttgtatatttctgcaactttatcatcgcaattttcatctatatagttttcaaccaaataataagcacgctcaagagaaatttcaccataactttgtataaaagaggttaagtactctgttttctttaaaatttcttctcctttcttaattggtatatatacatatggtaaatctaagttattaataatatgaaaattgtcgtcaatacgtttaattaagtcaggtttattacctgttgtttttataccaaaactttttaaaatactttgtaattcaggtcttgtctttttatatatactaacttcaaaatcattagtcgttgttaataactcagcttcaattaatttttttattgaattcataatttgaacatcattattagcaaggcacttattagcaaatatctcttctccaaccaatctatttacattagtgtgtaatactaataaatcacgtgcatttacgctcactagctttcatctcctcatttttgcttttcaaatttattaagtatgaataaaaaatacatccgaacaaacaaaatctctatattctaattcgatttacatagattatacactaaaaaaatgattctcaatgcaaatgaatgtgtctctcatagtctaaaaactcgtatgtttcgaattttatgattcattgataatagtaccagttaaaagaactaagattgtaattatccccccttaaaattcaagaatatattttcttaatctatcagcaagaggttatatttcaaagtgtttatttttaaaacaacatctaaaagccattttcataataatgttaaatcattagaatgtataaagattccaattaataaaaatagataaaatgcaataaagttccaaatacttattattattcatcacaaattacgtgatgccctctacaacactaaatcaaggatgatatttattttatatacattagcattcattgtttgcttacccacattatcctgtttagtcttttttataactctagtcttgaatgtcatatttacaaagaaaaaaacactaaaatatttaaaactaacactatttattcactttgttcttttatagcaccttttatgtttattttcttgtattcaataaatagtatggagatgataatttaaagtagatatatttgaagtatactatagagtaaattatattggggaaatatgtaaacgaaccggttgattttatagtggattaacacttcatagagaatataatcaagaacaaaaacagtcaataggtgtgaatttttttaaagacggatctgttgctactaaaaaaagaagtatacaattcaatagttaaaccttaaaacaagaaatattattcaaaatcaatgaatttcctatcttattagttttaacaatatttattctcatagagtttgtccaattaaatatagatgattcaaatatttataagcatacaaaagagcagtaagacattttctaatagaaaataactttactgctctttgtacattactcatcaactattgtaaattaaataataaataactacctattttattattcagctaaaaaatgctctgctaaatattttgctgcgccatcctcttcattcgtgtatgccgttacatctgaagttaatgcttggatttcagggcgtgcatttttcatagcaactgtataatgaccaaattcaaacattgctctatcattgtcgctatctccaataactaacgtttcttcttgatgaataccaaaatgtgcaatcatttctttaatgcctgtacctttatcagtttgataagccattgtttccgcattaaatcttgatgaatttgaaacactaatctgtagttgcacatgattttgctttaattcatctctaaatgctgttattttttctaaattagaactgaatagataaatttttgaatattcaccttcaggaaacttagttacccaatctatcttaccagcaagcgcatcttgtcttgaagaccattcactatgacttacgccattaataggatcttgactacgaatcatatctcgcatccatgtttcatcttcttttaaagaaactctattaccttcaaaaggaaatacctcataataaatttgttggcgcttagctaaattagtaatttgttgcacttgagccaatgataaaccatgcttgaagataatttctccatctacttctccaattgttccatttgaactaatgatgccattaaccgcaaaatcttgaggtacaagttgatgtatttcagaatgcgaacgtcctgttgccaaaaatactttatatcctttctctctcaattgattaatgacatctttcgtatacgttgatgcttgattattttcatgtaaaattgttccatccatgtccaaaaatattgcttttacgttatccatattgccctccactgtccattttatcttaattaaattttgtcattattacttattatttgcaaaatatttactctaacattgccatagaaaatcgattattccatctttgaactgctacatttttctggaaaaatcgtgacatgttttcagaagttaatatgtcttctacagcgccttgttgaatactttggccatcttttagcagtaaaattttggaaaagttagcagttatttcttcaataaagtgcgtcacataaatcatcgcaagcgttggatatgaatctgacaatgagtcaagtatacttaacaacgattctcgtgcaataaagtctaaaccagctgctggctcatctaaaattaaaacctggggttgccccattaaagctcgtgcaatcatcactcgttgtttttcaccggtagataaataaccaatatattgttgcgctttagcagacattccaactaatttaagtaattgatgtgcttcattacgtatctcatcatcaatatcttgataaacaccaattgatttaaaggcaccgcttatcaccacatcgattactctttcaccctcttgaaacttttccagtaaactatgagatacaaaacctatatgttgtcgtacagtctctgcagaataccctaccttgcctggcattttaccgaaaaggttaacagttccagatgttgcaggctcatacgcatttaaaatatttagaagtgttgtcttgccagcaccattcaacccatataatatccatttatcacctttagcaatttgccaagaaatcttttttaaaattgtttttccttgcttcattcgcccaatttgatctaattgaattaacatgcgaggtcacccctttattgctactccatacttctcataaaatcatattaacataacacccttaattgtcagactatttaaataaataaaacacttcatttttacgcatttctgccaaattaagatgaagtaaaagctaagtcgacctaaaaaagcacccttctagtcgattaatctaaaagggtgccatatactttaattttaatacatgattgattctaaaaaagtgaattattccacagtaactgatttagcaaggttacgtggtttatcaacatctaaatctctgtgtaatgctgcatagtatgaaattaattgtaatgcaaccactgatactaatggcgttaacaattcatgtacatgaggaatgacataagtgtcgccttctttttcaagaccctccatagaaataatacatggatgtgcaccacgtgctactacctctttaacgttaccacgaattgataaattaactttctcttgtgttgctaaacctacaactggtgtaccttcttcgattaaggcaattgtaccatgtttaagttctccaccagcaaaaccttctgcttgaatgtaagaaatttctttaagttttaacgcaccttctaaacttacgttatagtcaatagtacgtccgataaagaatgcattgcgtgttgtttctaagaaatctgtagcaatttgttccataattggtgcatcgtcaacaattgcttctattgctgttgttacttttgctaattctctcaataaatcaatatctgcttcacgaccatgctcttttgcaacgatttgagacaagattgataatactgcaatttgtgcagtatatgcttttgtagatgcaactgcgatttcaggacccgcgtgtaataacaatgtgtggtctgcttcacgtgataaagttgaacctgcaacattagtgattgttaatgatttatgacctaatttattagtttcaactaatacggcgcggctatctgcagtttcacctgattgagaaatataaacgaacaatggtttttcagataataatggcatgttgtagacaaactctgatgcaacgtgtacttcagttggtacgccagcccatttttctaaaaattctttacctactaaacctgcatggtagcttgtacctgctgcaataacgtaaatgcggtctgcttctttaacatcattgatgatgtcttgatcaattttcaagttaccttctgcatcttgatattcttgaataatacgacgcattactgctggttgttcatgaatttcttttaacatgtagtgtgcataaacacctttttcagcatctgatgcatcaatttcagcaatatatgaatcacgttctacaacgtttccatctgcatctttaataataacttcatcttttttaacaataacgatttcatggtcatggatttctttatattcgcttgtcacttgtaacattgcaagtgcgtctgatgcgataacattgaaaccttcaccaacacctaataataatggtgatttatttttagcaacatagattgtgtctttgtcttcagcatctaataaacctaatgcatatgaaccatgtaataatgacacaacttttgtaaatgcttcttcagttgaaagtccttgatttgaaaagtattcaactaattgaacgataacttctgtatctgtttctgaaatgaatgatacaccttgtaagtattcaccttttaactcttcatagttttcaataacaccgttatgaactagagtaaaacggccatttgatgattgatgtggatgagagttttcatgattcggtacaccgtgtgttgcccaacgtgtgtgaccgattccaacaggtccatcaaaatcgctactatcagcaactttacgtaattctgcaatacgacctttttctttaaatacagttgtattatcatcatttactactgcgatacctgcagagtcataacctctgtattctaatttttctaaaccttttaataataattctttggcattatcatagccaatataaccaacaattccacacataacgacattttcctccatattggaatagtacgcgtaaattatgatttattgccgataatttagattgacaatctgctttcataatataaataggaacatgctatcatcgcattcatccataacaaattaagcatagttatttttacaactatacaaattgctcacactgtactttccatattaatattttttatattcaatttctggcgatcttattaactttgtccattaagtcaccctaatgttttacttaataagctaacgaatgagccacatccgggatagcatccgccgatctattcgatcactatcctcctcgtctacaaatacatatattgcactctataaaggccactcatatattaacctttaatcttcaaatacaaatatttatttgcacaggcgctttaactgtactgccgaactttccccctttccattaatcattattgtacaacggtgttgttttgttttgcaaatattttcacaataaaattttaaaaatcctaaaacaatttttttgttttactttttcaaaatatctatactgtcacattgatgacactttatttaattttgtcacatttattttgacaaagttgatttttgtttatattgagtaacaagtaacctctctatacactatatatagtcacatatattaaaaaagaggtgtaaacatgtcacaaactgaagagaaaaaaggaattggtcgtcgtgttcaagcatttggatcattcttaagtagtatgatcatgccaaacattggcgctttcatcgcttggggttttatcgcggccatttttatagataatggatggttacctaacaaagatttagctactttagcaggaccaatgattacttatttaatcccattattgatcgcatttagtggtggtcgtttaatttatgatttacgtggtggtatcatcgcagcaacagcaactatgggggtcatcgttgcattacctgatacaccaatgttacttggtgcaatgattatgggtccacttgttggttggttaatgaagaagaccgaccaattgattcaacctagaacgccgcaaggttttgaaatgttatttaataacttttctgctggtattttaggatttatcatgacgattgcaggatttaaaattttagcaccacttatgaaatttattatgcatattttatcagtggcagttgaagcattagtacatgcacacctacttccacttgtaagtattttagtagagcctgcaaaaattgtatttttaaacaatgcgattaaccatggtgtattcacaccgcttggtgcagatcaagctgcaaaagctggtcaatcaattttatacacaattgaatctaaccctggaccaggtttaggtatcttacttgcttatatgatttttggaaaaggcactgcaaaagcaacgtcatatggtgctggaattatccacttcttaggtggtattcatgaaatttatttcccatatgtattaatgcgtcctttattatttatcgctgttattttaggtggaatgactggtgttgcaacttatcaagcaacaggatttggatttaaaagtcccgcgtcaccaggttcatttatagtttactgtttaaatgcacctagaggtgaattcttgcacatgttactcggtgtcttccttgctgcacttgtatcattcgttgtagctgctttaattatgaagttcactagagaaccaaagcaggatttagaagctgcgacagctcaaatggaaaatactaaagggaaaaaatcaagcgttgcttctaagttagtatcttctgataaaaatgttaatacagaagaaaatgctagtggtaatgttagtgaaacatcttcatcagatgatgatcctgaagcgctattggataattacaacactgaagatgttgatgcacacaattacaataatataaatcatgttatttttgcctgcgatgcgggtatgggttctagtgcaatgggtgcaagcatgttacgtaataaatttaaaaaggcgggcattaatgatattacagttacaaatactgcgattaatcaattgccaaaagatgctcaattagttatcactcagaaaaaactaactgatcgtgctattaaacaaacaccaaatgccatccatatttcagtggataatttccttaattcaccaagatatgaagaacttttaaataatctaaaaaaagatgatcaagcataataattaaataaattaaaaaatggaggataccgccatgttattgagtacacgtgaaaaagaaatgatagccctattgattaagtaccacggtcaatatatcactatacacgacattgctcagcaacttgcggtgtcctctcgtactattcaccgtgaattaaaaggtgttgaagcatatttaacttcattttcattaactttagaacgcgcaaacaaaaaagggctacgcattgctggcacagattctgatttaaacgatttgaagcaatcgattgcacaacatcaaaccattgacttatctgttgaagagcagaaagtaattattatatacgctttgatacaagccaaggagccagttaaacaatatagtttagcgcaagaaattggcgtttctgtccagactttagcaaagatgttagatgatttagagcttgatttaaataagtaccaactatctttatctcgaaagcgtggcgaaggcatttacttggtaggtactgaatcaaagaaacgtgaatttttaagtcaattaatggtgaataacttaaatagtactagcgtttattcagtaattgaaaatcattttgtctttcattcattaaatcaaatccacaaagactttgttgacttagagcgcatttttaatgttgaaagactattaatggactacctaagtgccttaccctaccaacttaccgaatcaagttatttaactttaactgtccatatcgtgctctccatttcacgtataaaaaatggagagtctgtcgcattaaacgatgatatttatgattctgtacaaaacacatttgaacacaaagtagcaagcgaacttgctgataaacttggtcaaatatatgacgtcacgtttaatcaggcagaaattgctttcattactatccatttacgtggagctaaacgaaaaaatcttaatgatacatcattaaataatcgttgtgaagaaaacaaaattaaagcgtttgttaacaaagtagaaatgatttccggtatgacatttgcagatttggatactttagtagatggactgacgctacaccttaatcctgcaatcaatcgtttgcaagctaatatcgagacctataatccgttaacagacatgattaagttcaaatatccaagactatttgaaaatgtaagattagctttaaatgattgttggcctgatttgatttttccagagagtgaaattgcttttatagttttacactttggtggctcgattaaaaaccaaggtaatcgatttttaaacatattagtcgtttgcagcagtggtatgggaactagtcgtctattatcaactcgtctagagcaagtttttagtgagattgagcgtattacacaagcatcagtcagcgatttgaagtcactagatttaagtcaatatgatggcattatttctactgtgaatttagacatcgactccccctatttaacggtaaacccattattaccagatagtgatatcagttatgtcgcacagtttttaaatacaaagtctacgttccaagagacgcatgataaatcatcaaacatgattgataaggatgatgttcatgttgaaacgaaagatgttgatggcaacacatcttttgaaaatgaacaaacttcatacttaacttcagttttcgaaaaacatttaagtgacgaaaaatcagaacaattattgcatcatatgcgttcgggtttaactttgcttgattcagtgaaaatagttagtaccgaagttaaacagtggcaaacatatatcgcagattatctatatcaatgcgatgtaataaacgatccaacgtcattcgctgaactactagagcaacgattgattgacaatccaggatggatattaagtccatatcctgttgcaataccacacctaagagacaatatgattaaacaccctatgattctaatcacagttttagaagaaccgttaacattgcctagtattcaaaatgacaatcaaacaattaaatatatgatttccatgtttatttctgacaatgattttatggcatcactggtaagtgacttgtccgaatttttaagtttgaaattagaatctattgatacttttatggaaaatccacaggaacttgaaacattattaagaaacaaatttttagaacgaattaaaaaacaatttatttaggagtgtacaaaatgagcgaattatttagtaatgacaatatctttttaaatgtaaatgttaacagccaaaatgaagcaattgaaaaagcaggtaaagccttagttgatagtggtgctgtaacagatgcttatattcaagcaatgaaagatcgtgagcaagtcgtatcaacatttatgggaaatggcttagcaattcctcatggcacagatgaagctaaaacaaatgtgattcactcaggtttaacattattacaaatccctgaaggcgttgactgggatggcgaagtagttaaagttgtcgtgggaattgctggtaaagatggcgaacatttagacttgttatctaaaattgcaattacatttagcgaagaagaaaatgtggatcgtatcgttcaagcaaaatctgcagaagaaattaaacaagtattcgaggaggcagatgcataatgaaagcagttcactttggtgctggtaacataggtcgtggtttcattggttatattcttgcagacaacaatgttaaagtaacatttgcagacgtcaatgaagaaatcattaatgctttagctcatgatcatcaatacgatgttattttagctgatgagtctaaaacaacgacgcgcgtgaataatgttgatgcaattaattcaatgcaaccttctgaagcgttgaaacaagcaattctagaagctgatattattacaacagctgttggtgttaacatactacctattattgctaaatcttttgcgcctttcttaaaagaaaaaacaaaccatgttaatattgttgcttgtgagaatgctattatggcaactgatacattgaaaaaagcagtacttgatattactggccctcttggtaacaatattcattttgctaactcagcagttgatagaattgtaccattacaaaagaatgaaaatatattagacgttatggttgagccattttacgaatgggttgttgaaaaagatgcatggtatggtccagaactaaaccatattaaatatgttgatgatttaacaccatatattgagcgtaaattattaactgtgaatacaggacatgcatatttagcgtatgctggtaaatttgcaggtaaagctacagttttagatgcagttgaagatagttcaattgaagctggcttacgccgtgttttagctgaaactagtcaatatattactaatgaatttgattttactgaagcggaacaagctggttatgttgaaaaaataatagatcgtttcaacaattcttatttatctgatgaagtaacacgtgtcggacgaggtacattacgtaaaattggccctaaagatagaattataaaaccattaacatatctttataataaagatttagaacgcactggtttattaaatacagctgcattgttattgaagtatgatgatacagcagaccaagaaactgttgagaaaaataattacattaaagaacacggtttaaaagcgtttttaagtgaatatgctaaagttgacgatggcttagccgatgaaataattgaagcgtacaattcactttcataatttattgagctttgtttgaaacaagaagtttccaacgttattcgttaacaatcagtaataatgtagtagttcccttgaattaacaatattaaatttctgaacataaaaaatactcccttcaacatagacacttaacttgtgttatgtatgaaaggagtatttttgcgttaataatttgttttattttcgagccacagccacctattcaatggctattggtcattactaaaacaaattcatattaactgttagacttggttacttagtaaggaatatttccctatgaaataactagatgttcacattcttgaataaattttattcttcagtttgttggtctttcttagtgaatcttctaattaagaatgccatacctgcacctagagctaattcagcatatggtaaatcgtcattatgtgacataccagtatctggtaaagttttagcttgttgtttagctttattaacttttccttgttgagctgattttgtcttagcttggtggtcgtcagtgttagttacattaagcatatcttgattagcactattgcttccatttgaaactgtagctggagatgcattggcaccgtcgttttgcgtagctttattgtttgcagctgaaccaactgatttttgcgtatcattagtatctgctgttgccgtatcatctttttggctaacattagttgaagtcattttttcttttgcttcagaagatgcagatgttgatggtttattcgaaacttcagtatcagctttgcttggcgatttatctgcttcgttagatgcaacgttagtttcagacttaagttgtcctgcatcagtttgatttgtcgtactttcttctttatcttttgatgtattagaaggtacatttggttctgttatgtctgctgaaggcaatgtttcagttgttgattcaaccatactttgatttgttgaatcactaccatctttttctgccttagctttattttcagattttggttgtgcaaccttgtcattagttgattgagattcagcactattatttacttcagcattttgttttgaatcatttacagatgcattatctttgctatcagcagatgatgctgcttctgtgctcgcagttgttggagccgttgctgttgatcctgttggtgcattctcgtttgttgctgtagttgtactattgttatttgttgtgctttctgctggcgttgcattatcagtttctgttacaggtttatcagttgtgccgttattagttgattctacttctggtttactagttacatcgttatccattgtcggactgtttgttgatgcatctacactagaattgttattagcttgcggtttatcatttgcatcatcagttgctgatgttgctgttgtttcacctgttgccgcatcactattatttggtgttgtcggagaagcgtctgctttgccattagctgtcgtctcagatacgttaggttgtccagtattttctggtgttgcattagcatttgaatttgctgttgcatcattattatctataccattattagtatcattagcatctggatcattctgaggcacaatcgcttcaattgcaggtatcgttacattttgtaattcagcaacttctgcatttgtttgtgttttatctaatttatcagcaaatctgtcaaaatatctacctaaatccgtacgtgcaatttctttcgccgatgcatctgcatctgcatttttaattatttctatttgcttgttaaccacttctctgattgcttccaaagcatttttcttaacttcaggattaatacgttgtgctttaagttgttcaagcgcactatttttgacagtagcgatttctgcatttgtagtttgatcagaaatatcttcagttgcttttgataaaatgtcttctaaagcattcgtaaacgcttctttttcttcagttgtagcatcagcgttgacatttacacctgcttcaatctggtctagtgcagtttctaattcttcgatagctttttgtttttctgttgagtcgatttgaatgttatcaaatgcttcaagtccttgagctttcgctttttcaacttcagcagttgttgttgcatcagtaataccttgtttagcttgatctgtaatttgtttaatcattgctaatgcttcagttttttcttcagcagttaactggtcactttgatcaatagattctttcgtatcttctgctttaacttcaatagcttggttcgctttaggtttaacagtagcatctacttgaatagcatcaattgctgctttaccttgtgttaatgcatcatcaacgtcaccattatccacaccattattaatgctttctaatgcagtttgaacattttggtcaacttgcttaattgcttgttgcttttcatcttgtgttgcattagtgtcagctgaaatattatttttcttctgatctgcataagcatataaatctgttgtagctgattcttttttacctgttggaattgtgtaatcgttaatattatctaagtcattatgaatttgaacttcaatgtcatctttagaagtagcttgattaacattttgatccgcagtttgttttaattcagcaagtttttgtttcgcttcagcaatttcacttgaagtcgatgcgttagagttatccgcttcgtttactttagcattatatgcatcttcaattttagctaaagcatcttttttgtactcactaaatgttttaactgcattaattttagcttttccttctttaactgcattatcaacatattcatttgttgatgattgatcgacatttgttttcgcttgatttaattcagtatcaacttcttgttttgcatcattaatttcttgttgtgatgcatttggtgtttgttctatttgtgttttcttatcagctgcagcttgatctaattcttttttacctgctggtttcttaacaggatttgcatgaagttgttgaactttttgtactgctgtatctttagcagtagttacatcacctgtagtagttgctgcattaatattatttaaaccttcttcatatgctgctctaactggtccaatatcgttacctttttcttcattagtagtctcattattattaagtatttcagttattttattttgcatttcagttagcaattccgctcttgcattcgttttaacatctgttgatgcttgaattgggtcaattgcttgaattgcattatcttttgcagtgtttacatcatcgattgactgtgcattttcaatattttgattaccttgtgttaattgtgcgtctacttgttgatttgcttgttctttttcttcagtagtcgcatctgcagtttgtgcaataagcgctttttgttcgtttgcttttgttgctaattcatctttcgcaacatctttaattgttgtatctgcagtaataccttgaatatcagcaactgcttgatctttaatttgcgtaacatcattagttgtttgtgcatttaagatatcttgatacgctttttctttagcttttaaaactaaatcttttgctgcatttttctcttcagttgtagcaccagttgtattatcaattgcttgattttgagttgtcacagcttgatcaacatcatttttagcatttgatttaaccgctgttgctggttgcgtgctttgaattgaattctttccagcgtctttcgcctgatctacaccattatcatcagttgcagctgtaatattatttttcgcgtctgtaactgctgttgctaattgttgaatagctgcttctttttcttctgttgtagcgttctgatcattattgataacatttgtttgcgttgcttgtaattgatcaatttcatctttagccgcttgtttcttcacaacttttggtgttaccgcattaatcgctgcttctgcatttgctttagcttcatcaacttgtgcgttagtagttgctgctgaaatggcttgatttgctttaccattttcagtatttgcttcagcatcagctgcttgtttttcttcatctgttgcatctggcgtagcttgaatctcttgcaatttgttatttaaaattgctgtgatttcattacgtgcagttgcttttttattaactgttggtgttacttgatcaatactattttcacctgtcgttttcgcttggtctacatcattttgactattagcagcttcaatgttgctatttgcttgtgtcacagcattatctacgtccgcattagccgctgcaatttcttcagcagtaatgtcttgcgtttgagcgattgctgttttacgttcattcgctttcgtagcaattgcttctttcgcattatctttagttgttgttgctggctgaatcgcttcaattttagcaattgctgcttttttagccgcttcaacttccgcatttgtatgtgctgcatctattgcggcatcagctgttgttttttcagtttgaacttgttgtttagcagctgctttttcttcagttgttgagccgttatttccatcaattgctgtttcttgagcttgtactttatctgcaattgcttgttttgctgctggtttaacatttgcatcaggtgtaatggctgcgattgtagcttcatttgtagtttttgcattatccacatcattgtttgctgcagcattatctatatcagcgtttgcagtaactactgcttgatccactttgtctttcgctgcttgttgttcttcagtagtcgaatcattcattgcttcaattgctgttttacgttcacttgctttttgagcgatttccgcttttgcatccgatttcttagttgtggcagcttgaacttgattaattgcagcaatactattgtctttagctgttgttacatcactgtttgtatttgcagcatcaagatttgttcttgcttcttgctttttagtatctaattctgtatatgcagcttgtttttcttctgtagttgaagcattgctattttgaatttcttgtttacgtgtattatatgcgttttctacttccgtatcagctgcaggtttaacttttgcttgtgtttgaattgcattgattttatctaatacttttgattttgtatcagcaacttcctgttttgatttaacaacttggatgtcatgtaaaccttgcttttgagctgcatctactgctgcatcagcttctgctacttcttcatttgttgcatttgaaactgtagcattttgagcttttctagctgttgcagcttgtttaacttcattataggcatccatttttgtttgcgtagagtcagtaatattttcaatttttgagatttcttcgtttttaactctttctaaatcttgtgcagtcgttgtcgcttcaattgctttaacaccagaaactttagctgcattaatacgttcaatagcttccgctacttcttcatttgttgtatcaggatttaaaggtgcttgatcaatttgtgcttgaacaacttcgtcaaattcttcaagagctgctgctttagctgttgtagcaggtgtagtttgattaatatcattgattgcttttgttttaatggcttctacttgtgcatttgttgttgctgcatcaatatctttaattgcctttgtttcaattttaccaattttatcatttgctacatctttttcatcttgtaatgatgcatttgactttttaatttgttgtttacgagttgtaactgcttggataatatcttgtttcgcttgaggtttaactgttggtgtaatcacatcttgttctaacactgcgataccattatctttttcagttgtgacaccttgtgctgtagtttgtttattaatttctgcgattgcattatttttatcattgttaattttagttacaagtgctgcaacttcatcttgcgtaacttttttactttgttgtgctgctgtaaccttttcttgagctttagtatctaattcagcaattgctgcttgattatcaattaatgcagcttgtaatttagttactaaaccatcaatatccgcttgagatgcacgatttgcagttttaacatgattcgcatcttcatttaaaatagtatctgcttgttgtttaagtttattgtattctgcaattgatgctgttgtgtaatgactattatcaacttgtgagtttacttgttgttgcaacgcatctttgttcatttcaaccgctactgaaaatggatctgcagttagtgtaacttctggttgcgcattattaattacaacatctgaagcagtacgatatgttaatttttcattaaaatcaatatttttaggtgtatcgatattcgcaacattaactttatatgataattttaaagatttatctgggaataaaacttctttagtgtgtgtaccacgtgccgttgtcacaccttggcttgtaaatgtaactttatttgcattttgatcataattaacagtcatatttttcaatactgtactgtcttcattaccattagggaatgttgtagttaatgaattattaacgtaagttacaccttgtggtaatgttacttcatatttaaattgatctgcttttaatgaagcaccaaaattaccattgttaccgatttcagtattaatagtatattctttattgttagttgctttcggtgctaaatctctatttttgacatataaatgtgatcctgagaatagacctacattatcaatgaatgaatagtatttataaccatctttatttgttgtaattcttgaagcatcagcaactgctgtattgtcaggaataaattgtaaatctaaacgatcagcatcagttggtactttaaataaatgtgcagtaccagtcttagcaacatttacagttgctaattcagtatttttcttagcatctttaataactaaatttgttgcaccttgcttactattcgtttgcatagtagtaaagttaataattaattctgaatctggttttacatttacagtttttgaaataccgttaaagttaccatgatctgtagaatcatttgcattcacacgacctaatgcagccacgtttcctttagcttgatagttttgagggttattcttatcaaacatatcgcttcgtcttaattctgagttaacgaaaccaatcttaccgttgttaattaatgaataaccatttactttatctgtaacagttacagttggatcctgtctattctcatctgttgatatggcaggatcatcaaatgttaatgtcgtattaatactgccttcaccagtattgctagcatttggatcttgagtttgtgcgtttgctgctacaggtgctgctggttgcgctgctgctggagcattcgctggctgtgtttgatttgccggtgttgcattattattaggtgttgcttggttatttccttgacctgcttggtttgccggtgttgcttgatttccaggttgtgcttgtgcagcgttattcggatcagcttgatcaccttgtccagctggttgtgtatttggttgtgctgctcctcctgctggattagcctgtccaccttggtttgctggttgtactgctggttgtccttggttggcaggtgcagctggctgtgctgtaggattagcttgagcaccagcatttgcgttaggctgtgtattggcatcagctggttgtgctggttgattttgtgcaggctgattttgctctgctgcagacgctgttgtcgggttagtagatataaaagtaacagtggcaattaaagctgaaaaaataccgacattaaattttctgatactaaatttttgttgtctgaataaattcattaagtcatcctcctggttgattattctcgctgttaaatgatttcacttaatcaactgttaagataagtagtagcatctgcgttaaaaacacaaagcaactctatctaattaaaattaattttatcatcattatatattgagtaccagtgtattttatattacatattgattactttgtttttattttgtttatatcattttacgtttgtactataaattatttctacaaacacaaaaaaccgatgcatacgcatcggctcatttgtaatacagtatttatttatctaatcccattttatcttgaaccacatcagctatttgttgtgcaaatctttcagcatcttcatcagttgctgcttcaaccatgacacgaactaatggttctgttccagaaggtcttactaaaattcgaccttctccattcatttctacttctactttagtcataacttctttaacgtcaacattttcttcaacacgatatttatctgttacgcgtacgttaattaatgattgtggatattttttcatttgtccagctaattcacttagtgatttaccagtcatttttattacagaagctaattgaataccagttaataaaccatcaccagttgtattgtaatccatcataacgatatgtccagattgttctccacctaagttataattaccgcgacgcatttcttctactacatatctgtcgccaactttagttttattagatttaattccttcttgttcaagcgctttgtaaaaacctaaattactcataacagtagaaacaatcatgtcattattcaattcttgatttttatgcatttcttgaccaataataaacataatttggtcaccgtcaacgatttgaccattctcatctactgctatgattctgtctccatcgccgtcaaatgctaacccaaaatcactttcagtttcaactactttttcagctaatttttcaggatgtgtagagccacatttctcattgatattatatccatcaggactacatccaattgtttcagtatctgcttctaagtcaccaaataagaatggcgctagtgatgatgttgaaccatttgcaccatctaaagcaattttcaaaccttcaaagttaacatctactgttgattttaaatagctcaaatatttttgtgccccttcaaagtaatctgaataatgtacaatatcattgccaactggtcttggtaattctgggttttcttgatccaataatgcttcaatttcattttcttgttcatctgatagtttaaaaccatctgatccaaagaatttaataccattatctgcaactggattatgagaggctgaaatcattacacctaactctgcacccatatcgcgtgttaaatatgcaacacctggtgttgaaataatacctaatcgcatcacttctgcaccaattgaaatcaaaccagctattaatgctgattctaacatttcacctgaaactctagtatcgcgacctacaagtacacgtgggtgtttttcacctttattatgtgctagaacatagccaccgtatcttcctaatttaaatgccaattcaggtgttagttcttggtttgcgacacctcttactccgtctgtaccaaaatattttcccattgtttactctcctttaatttagctatttattttacatttatataagccttcgtttcacttggttgtgctttagtgacatgttctggtaaattgatttttacagtcttttcagttgattctgaaataccatctaaatctacttctgcatcaacttcgcttatattttgtaagtcatctcgactaccgaagatttcaatttctttatcttctaaatcaatcgaacttaactctttatcatctgctaaactacctttctgtttaacatttactttaacctttttgctaaaaggctctactttaacttgtaaattcacttcattaggttgaatcgatacatttaatttattcagttttttatcaaaagccgttacttctgcgacatcttttgtgtcaccattaatctttttattagttttaaaagtggcttttaaataagcgatatcattcaattgttcttctccacctgttactttaactgtttgtggtgaaacttcttgctttgtaattttataaagtggatcaatatcactctgacttacatcaggttgaactgtcatctttttagttactttgttttcaagcgtaatatttgctaatttaggttttacagaataatgaatgtcatcagctaaccctttaacttgatacttctcttgatattttccagctttagcatttgataaatcaatcactactcttaaatcttctggattttcaatttttattatctttgattgtggtcctgaaatagtcacattaactgtttcaggcgcttttgttaaatgcaaatctttagtgttataaagaatttcaacgggtacatcttgaatcgttttactagacttttgaccaagattaccagtgttaaagatatttccaaaaacattgttaacagataaaaagaaaaacaatgccaaaagaaaggcaataaatctcaagccccatttactttctagcatattatttcacacctttcttttgaaagcgtgtgccaaaccaatgttcagcaagcaactcttcaaaaatttcgtttgaaatgtctcgtcgtaattttccatcaaatgttaccgaaatatcaccagtttcttcagatacaataacggtaaatgcatcagatacttctgaaataccaaccgcagctctatgtcttgtacccaaacttttagatatcttaggactatcagacaatggcaaataacttgctgctgctgcaatcttcgtgccttgaataatcattgcaccatcatgtaaaggtgtgttaggtataaagacattaattaaaagttcttgcgaaatatttgaatccattgcaatacctgtttcaatataatcttgaagacctgtttctttttcaaagacaattaatgcacctatacgtcttttagccatatattgcacagcctttgaaaccgattgaatcaatttctcttcatctttactatacgtattagaagtatagcgttttaaaaagctacctctaccaagttgttctaacgcacgtctaatttctggttggaatattactattaaagctaataccccccattgaataacgatatcgaataatttagatgttgcagtcaagttcaatatcatacttatctgctgaccaataacaattactaatatccctttaagtaattgtatcgctttagttcccttaaagaccgtgatgagaagataaagtacataccaaactatcagtaaatcaaggatactcgttacaatttttaacgtactgaggttttgaaaaaagttggaaaaatccataacatctcctccgggtaatatttttccataatacccattataccaatcatttacatcactgtcatacgaacatatatttaaatagaaaaaaattattttaaagattataactactcttaatcattttagtgaattaaaaaaagtagtgcaaaaagcaaaatatactttatacactacaaatcatttatttataataaagtttcaccaaaaaatgttccaactaatgaaaccgcttgttcagcagtatgattattactgtcaatcaatggatttacttcaactaaatccattgaggaaattaaatgtgattgatgcagtaattccaatgcaaaatggctttctctataactaagaccacccaaaactctagtaccagtgcctggcgtttcaagcggatctaaagcatcaacatctaaagataaatgaacgccatcaacattgcgtgacttcaaatattctattgtattttcaattacttcctttatccccaatttatcaatatctgacatagtaaatgttttaatattatgatctttgataaattgtctttcacctttatctaaatctctcataccaattagtacgatgttttctggcttgattacattactatttaattctaaaagttctttgggaccttcgcctgtcaaaatccttagaggcataccatgaatatttccacttggtgactcttcaggtatatttaaatcaccatgtgcatcataccaaataacacctaaattattataatgtttacttattgctgatactgaacctaccgcaatagaatgatctccaccaagaactagaggaaatctgttattttcaattgatgctgaaacctctttatttaatttttgattaacatctataatttcatcataatttcttaatcctttttgttcactatgaaatttttcaatgttcacagcaggtaccttaatatcccccttgtcatatacatcaaggtctaattgctttaatcttgaaattaatccagcatatctaattgctgttggtcctaaatcaacacctaattttctttgtccaaatgttgatggtgcacctataatatcaattgcttttgtctttgtcataagcgtccccctttgctctatgtaattaaagaataatgtatgcgcttaccattatcaagcaatagctacacatataatctgtttatcttattacttcataaaaaaaggttcttcatcttttatggtgggaaggtaaaacttcctgctttttttaatacacaaaaagcgcaattgcctctataatttaaagtgaccaaacccaaactaaaggagacaagtgcgcctatgtgtaatgataccttagaattactaagaataaaagatgaaaatataaaatatataaaccaagaaattgacgtcattatcaaaggaaaaaaagcaacagtggttaatgctgtactaacgtataagccttcggcctgttattgttgtggagttaaaaatgaaggacaaattcataaacatggtaagcgtgtttctcgtattactttacttaaaactcaagggtataacacatacctcaacttagctaaacaacgttttaaatgcttagaatgcaatggcacttttactgctaaaacgtcaattgttgatgagtcgtgttttatctcaagatgtgttactcaaaaagttatagaagaagctactaaagttaaaacagagattgatactgcagaagataactgtatctctccatctactgtaagtcgtattagaactaaagcggctaattcattacgaattaaaccctttaattgtttgccagaacacatcgctatggatgaatttaaaagcgttaaaaatgtaactggatcaatgagtttcatttttatagataatgatactcatgatgttatagatattttagaaaatagaactacaagattcttgcgtgcctatttcgagcgattcgatttaaaaaatcgacaacaagttaagacggttactattgacatgtatgaaccctatgtccgattatttcgcgacctatttcctaatgcagctattatttttgacagattccatatcgttcaacatttaaatagagaacttaataagtatcgtgtacaagttatgaatgaataccgtaataaaaaaggacctgattatacaatttttaagaataactggaaagtcctattgatggatactagtaaaaccatatttagtaaatacagatggaataaatcttttaaggcttataaacgctcatctgacattgtagaattcatgctttcaaaagacgatatactacgacactcctacgaacttgtccaaggattacgaaaagacctaaggttatgtaattggcctaaatttattaatcgtttaaattcagttagtaaaaagtctgtgagtaagggtgtatggaaagtggttaaatattatagaaaacatcaaaggatgttaagaaatacaatttattacccagcatttaataatggtgctatagaaggaattaataataagataaaattaatcaagtgaatttcttttggttacagaaatttcaacaactttaaagcacgtataatgatgattttcagcttgtacaaaggagaaaaaaagaagacaaccaagcccaataatggactggccgcctaataataaaagctctaaaagttgtattttaaaaatagttctttaaattatatacccaccacatttggtggagaacctaaaaaaaagcacttcccaaaaatggaaagtgcaagtagtgagccatagaggattcgaacctctgaccctctgattaaaagtcagatgctctaccaactgagctaatggctctaatggctgggctagctggattcgaaccaacgagtgacggagtcaaagtccgttgccttaccgcttggctatagcccaatatatagatggtggaggggggcagattcgaactgccgaacccgaaggagcggatttacagtccgccgcgtttagccacttcgctacccctccagcttattcatataatttaataatcaaaatggtggagaatgacgggttcgaaccgccgaccctctgcttgtaaggcagatgctctcccagctgagctaattctccaaaataatgactcctacgggactcgaacccgtgttaccgccgtgaaagggcggtgtcttaaccgcttgaccaaggagccatggctccacaggtaggactcgaacctacgaccgatcggttaacagccgatagctctaccactgagctactgtggattaatattatgcctggcaacgttctactctagcggaacgtaagttcgactaccatcgacgctaaggagcttaacttctgtgttcggcatgggaacaggtgtgacctccttgctatagtcaccagacatatgaatgtaatttatacattcaaaactagatagtaagtaaaagtgattttgcttcgcaaaacatttattttgattaagtcttcgatcgattagtattcgtcagctccacatgtcaccatgcttccacctcgaacctattaacctcatcatctttgagggatcttataaccgaagttgggaaatctcatcttgaggggggcttcatgcttagatgctttcagcacttatcccgtccacacatagctacccagctatgccgttggcacgacaactggtacaccagaggtatgtccatcccggtcctctcgtactaaggacagctcctctcaaatttcctacgcccacgacggatagggaccgaactgtctcacgacgttctgaacccagctcgcgtaccgctttaatgggcgaacagcccaacccttgggaccgactacagccccaggatgcgatgagccgacatcgaggtgccaaacctccccgtcgatgtgaactcttgggggagataagcctgttatccccggggtagcttttatccgttgagcgatggcccttccatgcggaaccaccggatcactaagtccgtctttcgaccctgctcgacttgtaggtctcgcagtcaagctcccttatgcctttacactctatgaatgatttccaaccattctgagggaacctttgagcgcctccgttaccttttaggaggcgaccgccccagtcaaactgcccgcctgacactgtctcccaccacgataagtggtgcgggttagaaagccaacacagctagggtagtatcccaccagcgcctccacgtaagctagcgctcacgtttcaaaggctcctacctatcctgtacaagctgtgccgaatttcaatatcaggctacagtaaagctccacggggtctttccgtcctgtcgcgggtaacctgcatcttcacaggtactatgatttcaccgagtctctcgttgagacagtgcccaaatcgttacgcctttcgtgcgggtcggaacttacccgacaaggaatttcgctaccttaggaccgttatagttacggccgccgtttactggggcttcgattcgtagcttcgcagaagctaaccactcctcttaaccttccagcaccgggcaggcgtcagcccctatacatcaccttacggtttagcagagacctgtgtttttgataaacagtcgcttgggcctattcactgcggctcttctgggcgttaaccctaaagagcaccccttctcccgaagttacggggtcattttgccgagttccttaacgagagttcgctcgctcaccttagaattctcatcttgactacctgtgtcggtttgcggtacgggcacctattttctatctagaggcttttctcggcagtgtgaaatcaacgactcgaagacacaatgtcttctccccatcacagctcagccttaacgagtaccggatttgcctaatactcagccttactgcttagacgtgcaatccaatcgcacgcttcgcctatcctactgcgtccccccatcgattaaaacgattataggtggtacaggaatatcaacctgttatccatcgcctacgcctgtcggcctcagcttaggacccgactaacccagagcggacgagccttcctctggaaaccttagtcaatcggtggacgggattctcacccgtctttcgctactcacaccggcattctcacttctaagcgctccacatgtccttacgatcatgcttcaacgcccttagaacgctctcctaccattgtccaaaggacaatccacagcttcggtaatatgtttagccccggtacattttcggcgcagtgtcactcgactagtgagctattacgcactctttaaatgatggctgcttctaagccaacatcctagttgtctgggcaacgccacatccttttccacttaacatatattttgggaccttagctggtggtctgggctgtttccctttcgaacacggaccttatcacccatgttctgactcccaagttaaattaattggcattcggagtttgtctgaattcggtaacccgagaggggcccctcgtccaaacagtgctctacctccaataatcatcacttgaggctagccctaaagctatttcggagagaaccagctatctccaggttcgattggaatttctccgctaccctcagttcatccgctcacttttcaacgtaagtcggttcggtcctccattcagtgttacctgaacttcaacctgaccaagggtagatcacctggtttcgggtctacgaccaaatactaaacgccctattcagactcgctttcgctacggctccacatttactgcttaaccttgcatcaaatcgtaactcgccggttcattctacaaaaggcacgccatcacccattaacgggctctgactacttgtaagcacacggtttcaggttctatttcactccccttccggggtgcttttcacctttccctcacggtactggttcactatcggtcactagagagtatttagccttaggagatggtcctcccagattccgacggaatttcacgtgctccgtcgtactcaggatccactcaagagagacaacattttcgactacaggattattaccttctttgattcatctttccagatgattcgtctaatgtcgtcctttgtaactccgtatagagtgtcctacaaccccaacaagcaagcttgttggtttgggctcttcccgtttcgctcgccgctactaagggaatcgaattttctttctcttcctccgggtactaagatgtttcagttctccgggtgtgccttctgatatgctatgtattcacatatcgataacatgacataactcatgctgggtttccccattcggaaatctctggatcaaagcttacttacagctccccaaagcatatcgtcgttagtaacgtccttcatcggcttctagtgccaaggcatccaccgtgcgcccttaataacttaatctatgtttccaccatttttataagtcaaacgctcacatacggcttcgttttcattattttaaatgctcatttacataagtaaactctgctttaaaataatttaactcattgtctgctaaacgttttcttttataaaaagatttaaacgcgttattaatcttgtgagtgttctttcgaacactagcgattatttcttatgaattcaagcttatttaaaactctttattcactcggttttgcttggtaaaatctatattttacttacttatctagttttcaatgtacaaataatggtgggcctaagtggactcgaaccaccgacctcacgcttatcaggcgtgcgctctaaccagctgagctataggcccatttttttgaatgttaaataaacattcaaaactgaatacaatatgtcacgttattccgcatcttctgaagaagatgttccgaatatatccttagaaaggaggtgatccagccgcaccttccgatacggctaccttgttacgacttcaccccaatcatttgtcccaccttcgacggctagctcctaaaaggttactccaccggcttcgggtgttacaaactctcgtggtgtgacgggcggtgtgtacaagacccgggaacgtattcaccgtagcatgctgatctacgattactagcgattccagcttcatgtagtcgagttgcagactacaatccgaactgagaacaactttatgggatttgcttgacctcgcggtttcgctgccctttgtattgtccattgtagcacgtgtgtagcccaaatcataaggggcatgatgggatttgacgtcatccccaccttcctccggtttgtcaccggcagtcaacttagagtgcccaacttaatgatggcaactaagcttaagggttgcgctcgttgcgggacttaacccaacatctcacgacacgagctgacgacaaccatgcaccacctgtcactttgtcccccgaaggggaaggctctatctctagagttgtcaaaggatgtcaagatttggtaaggttcttcgcgttgcttcgaattaaaccacatgctccaccgcttgtgcgggtccccgtcaattcctttgagtttcaaccttgcggtcgtactccccaggcggagtgcttaatgcgttagctgcagcactaaggggcggaaaccccctaacacttagcactcatcgtttacggcgtggactaccagggtatctaatcctgtttgatccccacgctttcgcacatcagcgtcagttacagaccagaaagtcgccttcgccactggtgttcctccatatctctgcgcatttcaccgctacacatggaattccactttcctcttctgcactcaagttttccagtttccaatgaccctccacggttgagccgtgggctttcacatcagacttaaaaaaccgcctacgcgcgctttacgcccaataattccggataacgcttgccacctacgtattaccgcggctgctggcacgtagttagccgtggctttctgattaggtaccgtcaagatgtgcacagttacttacacatatgttcttccctaataacagagttttacgatccgaagaccttcatcactcacgcggcgttgctccgtcaggctttcgcccattgcggaagattccctactgctgcctcccgtaggagtctggaccgtgtctcagttccagtgtggccgatcaccctctcaggtcggctatgcatcgttgccttggtaagccgttaccttaccaactagctaatgcagcgcggatccatctataagtgacagcaagaccgtctttcacttttgaaccatgcggttcaaaatattatccggtattagctccggtttcccgaagttatcccagtcttataggtaggttatccacgtgttactcacccgtccgccgctaacatcagagaagcaagcttctcgtccgttcgctcgacttgcatgtattaggcacgccgccagcgttcatcctgagccaggatcaaactctccataaaaattatgatgtttgattagctcataaatactaaataatgtttgtaacttatagttacgttttttggaattaacgttgacatattgtcattcagttttcaatgttcattaatattcaatctcttttattctacttcatttgtttcttgaagtcaataactttttgaacgattactttatttattctatattgtttttatagttatttcaatggtaagttttacacttttgaaattcttctttaaaaacaactgcgtcgtttttgacgactttatcatattatcaactttggaatttaaagtcaataacttttttaaaaactttttgtgttcacaacccgcttctttttcaacgcgtttattgcttaacacaagaacttattttaccagcattccaaaacaaatcaacataaaaacgtacaaaataaaagtaattttgtacgtttagcatatattatacctatttatttgtagcagctataactttttgtgcaatcgagctataaattttacctagacgatcatctgattgatatattgacggtgcaaaatcttttggattccaagatggttgctctactaaggtaattccccaagtaattgagtattaagttcatcagctaacttagtaccgccacctttgccaaagacatattctttattacccgtctctttactttcaaaataactcatgttttcaattacgccaagaatagaatgatccgtatgttttgccatcgcacctgcgcgagctgcaacaaatgctgctgtaggatgaggtgtcgttacaataatttccttacttgaaggtaacatcgtatgaacatctaaagctacatctcctgttccaggtggaagatcgagtattaaatattcaatgtctccccatttaacttctgtaaagaaattcgtcaacattttacctaacattggccctctccatataactggcgcattttcttccacaaaaaaggccattgatataactttaacgccatgacgttcaactggaattacttccttccctttaattccaggcttttcatcaatacccatcatatctggtacactaaatccatatatatcggcatctactaatccgacttttttcccttcacgagctaaggcaacggctaaatttactgcaacagtagatttaccgacaccacctttaccggaggctattgcaataaattcgactggattattttgagataataggccttctatcgttttaggtttattttcttcttttggtttaaattgatttactttttcttccggcaatgtttcaaatcgtataccgaccgttttcgcaccgttttcttttaatgcattaacaacagccatctgtaaatctaattgcggtgcaccacctaattgtgccattgctaatttaacactcacatgttctttttcttccttaatagaaacttcaacaataccttctgtttcttttaaaggcacatctataataggatctttaatttctcctaccaattctttcacttgatctaccgttaacaaagcaaatcccccttaatcattttaagacatctacatcatagcaaataacaatttttgcttagtctatcactaaaagtataaaactttttattaaataaaaaaagcagttagcctattattttaaatagaccaactactataattattttaaaatttccttctattactttctatttctttaggttctcttataaaaagtgctatcacataagctgccataacaagcacagctacaaaagcaaatgagatatccacccctatagcaatggattgctgtttaatttcagttgcagttaaatgcgatggcgatgtagataaaaatatttttgcaccaaaactcattaatgtaaccattaaagctgtgcctagtgaaccagccattacacgaccaaagttcataatagccgtgccatgtgagatttcttcatttctcaaagaattaattcctgtagtatttatcggcatcatgagtaaagaaactgaaaacattctaattgcatatacgactattaaatacgtataagatgtgtctgtatgcaagaaacacaacataattgtagtaattgttaaaattgtaaaaccagtataaatcaatggtctaggaccatacttatcataaaatttacctgtaaaaactgacataataccatttattattgcaccaggcatgataacaagtcctgataacaaggcagataaagataaactgttttgaacatatagcggtataagcagcgcaggtccaaccattgacatcattataatcattgaactaatcgtacataatgcaaatgttctatttttaaaaacccttaaatttaaaagtgcattagtaatattaaattgtctacgtataaataaatagataataaccatacttaatatcaacgcacctattactattggacttgtaaatcctaaatctcctgcactactaaatgcgtatagcattaacccgaacccaatagttgaatacattactgaacgcttatctaatttcgtatatttcacttcattgtaactcgagattgaaaccaaaccgaaaacaaaggcaagtatagcaattcctacaattataataaatggaactcgccaactcgcttgatcaataattaatcctgtaactgtaggtcctattgctggtgcaaattgaattactaaacctgctagtcccattgcaaaacctcgatgttctttactgaacaatgtaaataacgtaaattgcattaagggcataagtacgcctgcacccatcgcttgaattacacgagctaacattaaaactccaaaattcggagctaaggctgcaacaatagaacctaataaaaatgtccccatcgccgctaagtataaaggtctagttttaattctatccattagatatgccgtcagaggtatcatgacgccattaacaagcataaacccagtaactagccattgcgatgtactttcattgatatttaattctctcattatactaggtaacgctgtatttaataatgtttgatttaaaatagctacaaacgcactaatcaacataacagcaactatgaagtttcgtctccgggttgttaattcaactttagccatcataattcctcctttttaaaacagatatacacttgtccctttaatacgtatagccatgaacataatgggagtagtactcaaataataaagaagcactacataataaatcattattggttcttacacattaggcacagctaatgtgtacttaaaaactaacaatataacattgtagggcctaataatttattttatgtctcagactcatacaatggttatttaacttatttaccacaaattgagcactaagactcactattatcgattcttctattgaacaaaaagaagttggaacacatatgtgccctcaacttcagatatctattttctattatttaaatttttactttcagggtaaaattgaagcttacaaacatataagaaccctataataaccatgatgacccaaaaatcgatattgatatacacatagttcagatgaataataaaataaaataacgttgttgcaactgtgtaagaaatcaaatgaaaagtcgcgcctctaaaatatgcattttcaggcaacatttttctaaaataatccattaaatgctcgactgcaaatatgatgaagtacccaaagattatataactgccataatataataggttatcgtacatacttctattatatgtaaagtcacccaacctaaaataaataagtattctacttaatccatataaaccaaaccctagaaatgttaaaaaaatcgcaccagaaagtacaaaaataaagagaacaatcattgtagttaacaagttataaaacttatgtttaagataattcacaatcattggcctccttattaataaaatattgaacgatttatctagtatctaggaaatttattatttcttactttaattacactacatcaattttaatcataattctattcttttgattgagatgactgttctttaaaaaatacgacccataaaacaataagcccaatgctaattacagcaacagcacttaacacattgtgtaagtttggaccaaagattcctgattgtatcgcataaagatatcccattattgttgaacctattgatgccccaagatttttagttaatccataaaatgacatcattttcttcatttgtaatgggctagtttcctcttggacaatcacactatctttcgtataaatatatccaaaacttaatcctgccaaaattaacacaaatgctataagtaccggcaatttaataccaaatgaaatgataatactacttactagtagcaatgtaaatgatagtaagtaaataactttccttgatagttttgcttcaattcgatgtaaattaaaattcaatgtaatccaagctacagataaaggaaaaataaccaatccactttgcaatggagataatcctagttgttcttgaaggtagactggaatatataaattgaatcccattaaacaaatagctgttagaaggtcagttataaaaactaaagtaatcgaacgattaaattcaaccacaggtaaaaatggtgaagaaacatgtttttctactttaaataaacacattgccacaacgatagctaagataaaactcaagaaatttaaaagtaacagctgttggtttaataaagcaaacataatcaatccaataaatacataaaatagcgtgagccctttagtatcaaattttgatttagcaactgtttcttcctctggaaaatgaaatgtccatataactaatataatggcaatgatcgcaatcggtatatttatgtagaataaccaatgccatgttgcaaattctaatataccaccacctagaagtggcccaatgatactcgaaataccccaaacactgccaactatgcccataattttatatcgtaacggaatttcaaatgctaactttggaacaatttgcgataatgacatcaatacacctgatccaaaaccttgtatcacgcgtgatataattagcatagtaaaattagtacttaaaccacacataaaactacctatactaaataaaagtaatcctgcaattgccacataaataattttaaatctcgaaagtaattcgcccactataggattggcaattactaatgcgataaaatacgctgtgaaaattaatgaaattaaatttcctgcatttaaatcttgtttaattgtaggtaatgcaagcgaaataatagatgattcaatcgctgacataaacataattaatattaaagctataacagttatgattgactttaatcgcatgaaatacctccttctatatatttatttataagattttatttacaaataattggttttcatatgtataaacacttttgactttcaaatcttaacgataattctattacaatacaatcccctattagaatgatttatgtaataaaaaaagcggagtttcccccagcttttctaaacgactacataaaatataagattgcaattaaatgcaatagtgatgctattacaataaaaatatgccaaatcatatgaaaatatggtctattcttttgtgcataaaaccatgcaccaattgtataagacacaccacctaagaaaatgaataatatgaatatccatgatgtgcgaataaaaataattggtaacaagataatacctacccagcccatcactaaatagacaattaagcttaacttttggttaactttgacagctatggatttatataaaatcccccaaagtgtcgttccccataataaaataaatactgtccaacctatccaaccacctacaactgttaacaaaataggcgtatatgtaccagaaattgctacgtaaatcatactgtgatcgataatccttaaaatatatttatgaggtgtttcattttgcatagaatgataaatagtagatgaaataaacatcataaagatagaaataacataaatagacatactcacagacgcaagcgtaccatgtgcaatataactgtgcacagccgcatagggtaacactaataatgttaacaaagctgcaacaccatgagatgccgcattaccaatttcttctccaaatgataaagggatgatatccttaaatgtttctacgattgtgtcattactttttttagttgatttggacatcatagtcaccgcctatcattaaattaaacccattctacgtaaatcttctgttgcagttgcaacactatctttaccttctttatttttaagaggtgaaaattcttcttctctaggaacttgtaacgtgacaaaactagttccataagtaaatatgtcaaaatagaacaattcgaattttaaagttggttgttcaataacaccaaagttctcatctaattgcttcaaattcttaatagctaaatgataaggtaactcacgatttacagcgtttaaaataaaaccaagtttaaatgcatgaataccgatattagcattgttaaattgatttgcaacttctggatctaattctgaatactccagtactgtatctttacaatcgacattaactaaacgtccaacactttctcctggttttggttgaatcgttttagaagtaatatcgtaatcatgttctaccgtaaatcctgcaaatagtggatccaacactcttactaaaacattgtcgatattattcaagaaaatatacttaacgccattattagacatttcttctaagtatcctgccttgtctaaagatttaaacacgccaccattaccattcggcgtttccataatacgaccctgttgatttaaaattaacttcccttcttcactaagcgccacaatattatcttgtttaaagaaatggattgcttcttgatcatatccaaaataactatgtgcttcgaaataagctaaagtttcttcatgattgatatcacttgtcataatataccattgaatcgtatgtccagattgatgattcaatgtttttaattggttagcttgaagttcaaataaacttacaccttcaatttcaaacgaacctttagggcccttgtaaccaagtcttgttccttgaccacctgccatcaaaagtactgcaaattgtccttctttaatagcttgaagtccttgttcctctaaacgcttaatctcatcatcactcatttgtgatttaatatcatatttcacttcagaaactgcagatacatcatctattgttttcttattgatgtataaatcgttatataatttggcaataaaatctaaatctaatgacgctaccttctcttcaagtgcttctttttcattgttactcattattttttcatattcacacaaatgatcttgtttatatttagctaattgatttttatctagcattttatgcctcctgctgagtttgtaacctttaataatttattttctataaaaacttagtattccagttgcttattatatcattgatgaaaggctgaaataaaacataaactgttccgaccattaacgctgtagctaaagataagtctacaagtccacctgttttaaattgaatcggtgtcttcacattaaacggtaacggataaaataatttcacgccttttggtgttatcatatctagtataacatgtgacactaatccaattataattgctgccatataataattaggcgtctgaataatttgcaataaaaatgctatgattgcgataaataatattgaatgcgtaaaggttcgatgtccaaagatcaatctcacaaaaaaactaattaccttaaaccttctgccaatcttactttgagtgtgacatatatcgggtaataagctagctagagttgctagaatgataaccgtaaccgacgaaaaaatatccgtttgaaaatattgtgttgttagcgctccaacgagcatgccgcatgaagcatgtgttttacctgtcatatttgttctcctttaatactcacattttaccacatccctaacaaaaacacgaacatattttcgggttaaaattcattagtatgacacaatttaaaaaagtatcacataactcttgaaaacgattacaaaatcgtttatgatgtatttacaaaatatttaaaggatgtgtttgaataatggcaatgacagtaaaaaaggataataatgaagtgcgtattcaatggagagttgctgatatcaaaattcctacaagtgaaattaaaaatattacacaagaccaagatattcatgcagttcctaaattagacagcaaagatgtatctagaatcggctcaacgtttggtaaaacgaatcgcgttattatcgatactgaagaccacgaatacattatttatactcaaaatgatcaaaaggtttacaatgaattaactaaataaattgtataaaaaaatcattcatggtgagggcttcatgaatgatttttttaattgattcaacacccagcataaacaaatacaaaaggacaactgttcccataattttaacagttgtcctttttcacatatatttataacaaaagatgtgccatcaaagaaataattggtagtgtaatgattgttctaatcaagaaaatcataaacaatttgccgatgcttacaggaatcttcgaaccaagtatgacgccacctacttcagacaagtatattaactgcgatatactaagtgccccaataacaaaacgagttatatcattttgtacaccttcaattaatatagaaggtaaaaacatatcggcaaaaccgataataatcgtttgagaagcctgtgccgcttcaggtatttgcattaactctaaaaatggaacaaaaggtttacccaatatgacaaaaaagggcgtgtagttcgcaataatggtagcaatagtaccaatactcattactacaggcaaaataacaaaccacatatcaatgactgtttttaatcctgacttaaaaaagtcaataacgcccggtgctttaatacctacttctgttgcagtatcaaagccatgtctcaatgccgtctttccttctggcaatgcctcagtacgcgcactttcaggtacctccttagcatactcatcaggaattttatttaaaggccaaattcttggcataatgactgctgcaacgaggcaggatactatcactgataaatagaaagcaaaaaattgattttgcatgtgcactgtttcagcaactacaattgcaaaggtgatagaaactacactaaatgtcgttgaaataactgttgcctcacgacgagaataatatccttcaccatattgtctacttgtaattaagacaccaacagttccgtctccaataaatgatgctaaattatctaccgtcgaacgtcctggcaatgtaaataaaggtctcataaccggtctaaaaataggacccaacatctctaacaaaccgtattccattaatagcggtaaaaatagagctgcaaataagaatactgccactaatgttggcaataaacttgagaacaataatccacccgtttcatctgagtaaataacctttgaaccaattcgtaaaaatgtcatccatgcaaaaacaactgctaatattcgtaaaattaaccaaccaattctaacgttaaaagcattgttcattagcccgtcaggtttcaatttatcttttaaaatagttgaacaaatcagagttatgatacccgataaagtaattatcgtcacaattaaaaatggcattacgccacctaatacatctttaagcacgcctgctaaaaatgccacgggcaacgttgtttgcttctgtccatcttgttcgactggaattggtactaaaaataataagataccaattaaagacatcgtaataaacttaagtctcccaataactatctctttccttgaaaagctatccataaaatcaatccatttctctatgtattcgttttaagtatatacagaattctattcagttaacaaacatattccttatcattctatctttcaaaatgtttatgtatgcaaaataatgaataattacagttattaaatatacgctatttcttgtaatttttcaagatgaattcaaaaaaggttaagtacaattactgatttcgtacttaaccttttttaaactctaatcatatgttagttatttcattcttcgtaataatattaagaagtatggtgcaccgataattgcaatgataaccccaacaggaatatccagtggcggatgaatgccacgggctaaaccatctccaaatgttaacaatatagcaccaattaaccccgacatgataataacgtgtaatgttttatttcctattaattgtctcgcaatatgaggtgcaattaatcctaaaaagctaataccaccgacaactgaaattgcggatcctgctaatattactgctaaaattaacaatagcattttaatagttttaacttttaaaccgagtgcggttgcaacagcatcacctagattcaatacatctaattgataactcaataaaatgatgattggtatcgttattaaaaaccaaggtaatatagtataaatattcgacatatcatgtccatatagactacctgtcaaccaaacaagcgctttgtttgcttccagtggatttctgattaataagaactgcacaatcgccgtacatattgcgcctattgctaaaccaattaaggcaagctttgaacctttaacatcatattttgaaattaaaaatgataaaaataaacttactgcaaaggcacctaagaatgaacctataggtaatacaaacaatggtgctgttggaaaggtcataataataatcacagcagctaaactggcacctttagaaatacctataacatcaggtgaggctaacgggtttcttattacagcttgtataattgcacctgaaatagccaagctactaccgataataataccaagtaatgttctaggtatacgatactcatttaaaataaaatcatcttgtgtaaagattcccttaatagcatcaatcggatgaatcatgacagaccctacacataaacttatgaatatactcacaattaaaaggattgtgattaaactataacgacgtataattttcgttgtcatcatattcttttcacccctttaatcgttataaataagaagtaaagtgcacctacgaatgatgtaacaatccctactggtgattcataaggatatgtaattaaacgacttaatacatctgatagtagtaacaaatctgcacctataataaatgttaatggaatcatgactaaataattcttactcacatagcgtttgactatatgcggtacgattaagccaacaaatccaattggtcctgccactgacaccgacatacctgtaagaataatgactaatagtccaatgataattctaactttatttatattttgacccaatcccttagcaatgtcatcgcctagttccattatcgttagttgacgtccaataaaaatcgttacaattaaagcaccaataatccatggtagaatggttaaaatttcatcccacttcatactggataatgaaccgacaagccaaaacatcacttgttcgtttgaattctcattcaaaataataataccttcggtcatactactaaaaaacaaatggatggccataccagccaatgctaatttaatgggtgtcatacctttcgtagcacctgaaagtgtataaacagttaaaccacctataaatgcacctatcacacctaaatataatgcataatattctaatgctggaatgataatcgtcacaaatacaatgaaaaacgatgcaccagaactgacaccaaaaattttaggtgatgctagcggattgcgtgtcattgcttgcattaacaaaccagataccgctaatgcaccgccaataaataaccctgcaatcatccttggcatacgtacattatgcaataaaaacgttgctttcgtatctgtatgaccagtaacatagtgaatgatatcgctaaaattaattttcgaagaaccaatcgccatatttaaatatatacaaataaaaagaaagcacaaactcactatatacgtgagtgttgtgcgtctttttcttttatgatctatggcagattggctacttatttcttttatagccatttacttccaccttacttttgttctttttttgataattcaacaagttctttagccatttcttcagaagaaattaagccacgagatcttgcccaaacatcacggtcaacaatatccacgcgattatttttaactgcattcaactttttccatgttgcatcttcttgtaacttcttgaattcagcagaatcttttttagcatgatctgtcataatgatcatacgctctggatttaaatcagctaaatgttcagtgtctaattgtaagtaaggtcctttcaaatatttacttaaaccttttgttacatcgtcacttaatgcatttttaaatcctagttcgtttaaaaattgtccaacatatgaatagtttggatgtgctaataaaccagctttagcaactactgctggaagcactttttgatttctatcaaatttaatttcatctttatacttattgattaatttatcatgctcagcaagacgtttttcgccttctttttctttatttaaagctttagcaattgttttgaacgaattaatattttgtttgtagtctccatcaaaactctttaatgataatgttggtgcaattttgtttaattctttattaatacctttatgtctactgctatcagcgataattaaatccggttttaatttactaatttcttctaagtttggctgtttacgtgtacctacagaagtataatccccaattttttctctaactggtttaatgatacgttttttcttaccatcatcagcaataccaactggtttaacgtctaatgctgctaatgcatctgcaaatgagtactctaatacaacgatacgttttgcatctttaggtacttttactgtaccattttcatcttttaccgaaatagtatctttagttgatgattcttttttacttgaattatccgtattaccacaagctgcaactaaaagtaaggcaactattaatcccaatatactaaaagtttttagacctctcatcgttccactccttaatatgtataacttcatttattattttattgataacaattatcattgtcaagtagcgttcaatcttttttatatttctaaaatgtatgactatatatttcctctaataattatgactacaattagcacatttccttagacaaaatactgataatgtatcattgctatatcatctttgcattaatacaattgacaccatttagcatgaccgttatccctgtaattcagctgatattatctgttgcaattttatgtgacgaactgttgcacttaatttgataaatcaacaaatacaaaaaatctaagttgaacaattatgatacaaccgtgcaaacgatatgtagtataacttgtcaacttagacttattgataaatatattaatagtggtttaccatagcaggagatttcacatcaaaattttgaagtagcgtatcaatctttgaatcatcaatatataccttatgtaaatttttcatatacatcgaatgagaaagtgcttcataatttaatgaaaaagatatatgatctccaacttgatagtgtccttgaccatttaaatcaagcattaaatgatcactcgaagcgcctaaaatattgatatgctgatccataggtgaaatattatcgacttttgtatctaaataaccaatatctacaatagcttgtaagaatgattcatgcgtttgtgtattaactcgaggtttaatttctaaaatctcagcctccaatgtaatcgcatcttgatataacatagcgatcgcttgatttgtcgttgtatcaacacctctaaacaacgtttcacctattcgcaattcatttattttacccaaatcattatataaaagttgtggtaacatgctcgaattaccacctgaaataattttcaatcgatatcctatttctctttcaacagctgagacgaatcgattaatcataaagatatcatcatcacttggcgcatcagatttaaaacacataaaattgaatgctaaacctacaaaatggatatttttcaagtgaataatctctttaatataatctaaaacatcataagtcagaacaccttcacggccatctttccaatctaccattaataaaatcttatgtttttttcctaaaacttctgctacttcatttatttgatgtatggtagataattctgtttggatactcatatcaactttttctatcatatctgaaatctcttttttggcaggcgtacgcaataacgtatatgttaaatcctgatctgcaatactaattatgttatccaatctggattctgcaacatgattgatacctaacgcttttaagctttctacaattgtacggtcaccagctatgcacttaattactggtgtgaattgcatatttttactttgaaaaactgtttgaagtactttggcgttatatttaatcttcgatatatttatgttaacgtgtgccatgtagtactacacctctttttttatcggattatctaactcaatatttaaatattgctttactttattttccattctcatatttaacaacgctttgacagtaattgttggtccaaacaaaatatcttttaactcatttgcatgtggtagtgttgggttaatggcatgcgctactacttgctgtactatgttaaataattcggtttcttcaacacaatcatactgattaaaatgatggattaattctgccatttgattttgaataacagcatgttggaattttgcaatcactgcatctatagaatcagctattaaactatcatttgtaattttaatatctgatacacgatgttgtaatgtttctaaatcaattctagaaccacctaaatctctcactaaaaattgaatgtcaaaatgtggccccaagttcactactgtattttgcatgtgtgcttctaaagcaattccataattttgaataaaagcaattaaaggcgggattaatgcttgagcgtatcgttcaataaatgtcgtaatactttctttagtaattccttgatttaaccactctaagtaactatccacgataactttttgatctattggatttttattaactagacttgcactaactactgttgcaccttttccatcaatttcaggcttttgtcttataatacaagcaagctgacgtgccctatctttatcaacatttgcatattcaccgaacggttccatagcaactttaaatcctggatattgattcaacatgttttgtaaagcataacttaactttggtccatctacagtagtcacagttgagactgttctaacggcacttgttgcttgtgcatcgacgggcaacttaacatggtatggtttatcaattaaagacatcgtcctaaatgataaagttgcttttgaaagtattgtaaacggcgttggaattaatatttttttagcaatccatgcttcaaaatatttccctatcgtatgatcatattgccaaggatgtactaaaatcgctctatagtcttcacttttcaaacctaaactctttaaaaacacacgaatctgattgtagtattcgggaattatttcatcaataataaattgatcattaccatccatagctgtgcacacaacatggtctttttcaatcatcataatttgcaaagggatttctttttcaaactcaggtgcatatgctcgtacttcttccatagttaagggcaatttcgttttggttaaagggtgtgttggatgcccctctggtaccaaactctcagaataagttaaatcatctgtcttatcactatcttttacatgttgtaaccatgaaaaaaagttaatatcttgtggtaaccttgaaaatttaaaactttgacttattaacgtttgtctgtgagacatttgcttatatgtttcaactaaactatctcgactgtgtattaactcttcgcgtagtcgctctgaaatagggatatcaaagtcatgattcaacacatctaataaaccttctaaagttataattaatgacgtttcacctttatttaaataagtaatatcacctgtaaactcatagcgttctaatgcactttttctaacaacttcaatagtcaacacatgcatatgatactgaatttcaattaaagatcctttttgcgaaataaatgtttgctcggggtaaatacgttctttaataatggcgttaattacacgatattgaatatttctatctgcctttgcccattcaagatataccatgattactttcctccaactttaacttcaactttctatttataaaatagaataccattgtaatgcatatagtacttattcccattattgaaaaagttctaacaatgccaaacacatctgcacatatactcattaatagacttcccaatggaatcatacctctatccatcataataatactcagtactttaccacgttcataatctttaacattattttgaaaataaacgcgatttgtcgtacgtgcccattgactaaataacccaatcaatgtaatacaaatgaacatgatgacaatattgtgaaataccacacctaacaaagcaatgccaaataaaaatgaacttaaataatacatatttaccataccaatatatttaagtactttaggtaaaactagcgttgcaataataccaccaatggcacacatcgtcatagcgataccaaatatttcagatttccccggaaatactttgtttgtcaaaactggtaaaagtgtcgtatatgaaaaacctgtcgccataatcaataatgatgttataaatatttgtcgaccttccatatgtaatttgaagtaatctataataacttttaacggcatgtatcttgatgcatcttcaggtattttagttactttaaaatgtaatggtaagcataataaaactgcgataaaataacaaattgcctgtgcaagaaatgttgttggcgcatgatagactgctaatatgacaccagcaatggcaggccctattgaacgacaaatattaatgatgaatgaatgaaatgatacagcttgtgtagtagatattttatctgataaatctggtaagattgcttgtcttaaaggtgtttcaaccgcacttaaaatccctcttaatgtcgcatatataataatgacgctaattggaattgcagtgaaactatacgtgagcacacataaaattgcagttactaaaaatgatgatgaaattgtaattctcagcaatcgccctttatcatatttatcggcaattgcccctgcccacacacttagtaataatattggtacaagtctgcaaaaattgacaatccccagataaactgcgttatgataagtggtaagtacaaaccaatttagccctatttgtccaatccaattacctagaaatagtagaaaagaactgctaaaaaaatattttgtcataaaacttacacccgcattctgttgataataagaatcattatcattaatatggattatacaaatctatcttgcttttgtaaaatatttcatagaggtgaattatgaacttgaacttaatttttaaagaacagacattaaaatttaacaaagaagaacaagaaacatatttatttttacaacaacataatagcgattgggctaatatttttaaagagatgattttacaaggaagagataaagtcactcagagattggtcacatcaatgcatcgcgaaaacttagttaaagcgcgcactcaaagtaagaaaatattgagtcgtgatttgattatgttagatatctcaacgactcatatactagaaatccagttcccacaagctaagcaaacattatatgctcctatcactggagaacacgcctttgatcgaattgatgttgaaggccctttctacattaaagatgacattacaaatacgattacacgagtacaccatccaaatgaaattcttgagtgtattttaattgaagcaccagatttaaaaaatgctgctagtgatcaatttcagcaagatttaataaacagtgcaactaatatgacatttgcaattagctatcaagcactgtcaatgcaacatgattctgcacctttatttaatattatcgaaaatagcgaagatagttacttgcgttcagagcaagccgttattgaaggtcatccgctacatcctggggctaaattacgtaaaggtttaaatgcattacaaacattcctatattcttcagaattcaatcaacctattaagttgaaaatagtactgattcacagtaaattaagccgtactatgtcactgtctaaagattatgatacaactgttcatcaactatttccggacttaattaaacaattagaaaatgaatttacgccaaagtttaactttaatgattatcacattatgattgttcatccatggcaattagatgacgtattacattctgattatcaagcagaagtagataaagaattaatcattgaagcaaaacatacgttggattattatgctggtttatctttcagaacattagttcctaaatacccagctatgtcgccacacatcaaattgtcgacaaacgttcatattacaggtgagattcgtacattatcagaacaaacgacgcacaatggtccactaatgacacgtattttaaatgatattttggagaaagatgtcatatttaagtcctatgcatcaacaattattgatgaagttgctggtattcatttttataatgagcaagacgaagcagactatcaaactgaacgaagtgaacaattaggtacattatttagaaaaaatatataccaaatgattccacaagaagtcacaccattgattccttcaagcttagttgcaacctacccatttaacaatgaatcacctatcgtgacattgattaaacgttatcaatcagctgcatcattgtctgattttgaatcatcggcgaaatcgtgggttgaaacttatagtaaagcattgcttggtctcgtaatcccactagttactaaatatggcattgcattagaggctcacttgcaaaatgctattgcaacatttcggaaagatggtctattggacacgatgtatattagagactttgaaggtttaagaattgataaagcacaactaaatgaaatggtatacagtacatctcatttccatgaaaaatcaagaattcttactgattcaaaaacgtctgtgtttaacaaagccttttattctaccgttcaaaaccatttaggcgaattaattcttacaatctctaaagcatcaaatgattcaaacttagaaagacatatgtggtatatcgttcgtgatgtactagataacatttttgatcaacttgtactttcgacacacaaatctaatcaagtaaatgagaatcgcataaatgaaattaaagataccatgttcgcgccatttatagattataagtgtgttacaacaatgcgtcttgaagatgaggcacatcattatacttatattaaagttaataaccctttgtatcgagaaaataattaaggttatagaattttattaatcgtgagctcaaggattacattaacttattaaatacaatctatacaaatgagagaataatacattttccatattcaaattattaaaaatcacaaaaaacaggctgggacataaatccctaaaaaaacagcagtaagataattttcaattagaaaatatcttactgctgttctctatttatacaatacttcgtattgaatggcttcgctttcctagggtgccgtctcagcctcggtcttcgactggcactgctccctcaggagtctcgccattaatactacgtattaacatgtaattttacttttacatacttttaaaaaataagacactttgccaaacttgcacataaatgtttaattcaataatttgaattttctgtgttgggtcccttcgtataatttaataaataccactaaactaaattaatgaagtgccttatgtataaaaattataacttgatccaacttacactaccaatagaaacttctgttagaattcctcaaattgatatttcgcgatatgttaatgaaattgttgaaacgatacctgatagcgaattcgataaattcagacatcatcgtggcgcaacatcctatcatccaaaaatgatgttaaaaatcaccttatatgcatatactcaatctgtattttctggtcgtagaatagagaaattacttcatgacagtattcgaatgatgtggttagctcaaaatcaaacaccttcttataaaactattaatcgtattagagtgaatcctaatactgatgcgttaattgaatctttatttatccagtttcatagtcaatgtttaaagcaaaatcttattgatggtacaaaagtagaagctaatgccaataggtatacatttgtgtggaagaaaagtattcaaaatcacgaatcgaaattgaacgaaaattcaaaaacattatatcgtgacttagttgaagaaaaaataataccagagataaaagaagatggagatagcgatttaacaatagaagaaatagatttaattggtagtcatttagataaagaaatcgaaggtttaaatcattctattgagaacgaagatagtactcaaattagaaaacagacccgtaaaaaagaactaagattaagaagttcaaaaataaatttgatgattattccgaaagaaaaaataaatatgaagaacaaaaatcgattcttaaagatagaaatagcttttctaaaactgatcatgatgcaacttttatgagaatgaaggaagaccatatgaaaaatggccaacttaagccaggatacaatttacaaatagcgacaaattctcaatttgttttatcctatgacctatttcaaaacccaacagatactagaactttaattccatttttaacaatgattcaaaataccttcggttatttaccggagtatattgtagctgatgcaggttatggtagtgagcaaaactatatggctattatagatgattttaataaaacgccacttattacgtatggcatgtttattaaagataaaactagaaagtttaaaagtgacattttcaacacttaaaattggaaatatgacgaacttaatgatgaatttatatgtcctaataacaaaagaataggttttaaaagatatgcataccgtaatgatagatatggttttaaacgagacttcaaactatatgaatgtgatgactgttcatcatgttctttgagacatcaatgcatgaaaccaaattcgaaatccaataagaaaatcatgaagaattataattgggaatactttaaagtccaaattaatcaaaagctttctgaaccagaaacgaaaaaaatctatagtcaaagaaaaattgatgtagagcctgtttttggatttatgaaggctattttgggtttcactcgaatgtcagttcgaggaataaataaagttaaacgagagctaggttttgtattaatggcacttaatataaggaaaatagcagctcaacgagctgtacattataaaatacatatcaaaaaagctgatttctatcaaataattaatagaaatcagcttttttacattgcctaagaatttaatgtcccaagccctttttatcgaataacttattgtaaaccttgtctttcttggttattgttttcgttatttttttcgtgtttttgtttccactctttttgagtcattacatcgtcaacttgcatgttaacttcaactacatctaaaccagtaatatatttaacttgttctttaactaattcagttactttacggaagatttttggtgctgattcaccatattctaagattacttttaagtctacagcagcttgtttttcaccaacttcaacagatacaccttgagtaacattgttgccacttgagaatgcattagtgaatgtatcagttaagccacctttcatatctaagatacctttaacttcacgtgcagcgataccagcaattttttcaacaacttcatcagagaatgttaatttgtttttgaattgaggctcctgattttgttcttgttgtttttgacgctcttctctttctttttcgttaacaccagtttgattgtcgtatgcttgttttgctttattgttatctacagtcataatagattctccttttacttgttaatttttatatttttttaattaaattctaaattgatgaattaactccatcgatttaaaaaattcataaaatcttgcttacggtctttcatatacccaatacctacaccaattaaacataaaacgatgataagtactgttttccaaaaacctaacgttaagaataatatcgcgattaatagaaacgctaggaaaccaacgattctccatttaaatacttttaaaaaattaatcacttgttgtgtagagtcttgtccgttttggttatgattgttagccatgatatacctcccttacaacactcgtggaccagaagttttctgatctctcacattaacttctaacttacgtactggcatttctgtgaaatattctacattctttttaatatccgaacgaattgcttcagttaaagattgaacttgaacattatttggtacgaaaaagtcagttttaatgtcgatataagatttattttttttgttatatagtttcgcaactacatttggttgtcttacttgatcatattttgcaaccgtatcgaatgccgtcttttcaacagctttacgagatacgtaaacatgaccatcatcgaagtctttgtataatccaggttttcgatgcgtaggtttgaagatactaaatactaatataagacctattaatatcaatagtgcagcaagtgaaataagtaatggttggaaccattcaaattgaaggaagtagtcttgatattcagttatacgtccatcttggatatacatgaataacaggaaccccacgattactactattaataagccaaggataaagtttttaagtcgtttcacccctaacgacacctccttagttaaagttaatttaaaaacatattaaatatgtacccatcagtttttttcttaaacataataaattaataactttaaatttatttttaatatataagatgaagtaccatttagtaatatattccctagtttttgtaaataaaacctcattattaattaattttcgtcaatatgttttgaagaacgatattctaaaatatctgggtcacgatgtttaattaaaaccttattactatttctcggtttctcctcactcaaagattttataagcgaccatatcatcgctataatgaccacggaaaatggtaacgcagcaatgattaataaattttgaattgcttgagtaccacctgtgtaaatcatgatgattgcaaataatgccataatgataccccaactcactttgacaaatgacttcggattaatatcaccacttgaactcaacatacctaaaacataagttgccgaatccgctgatgtaacaaagaaaatcataataacaagtaaagtaattaagcttaatacaaaacctagcggataatgttgtagcgtcgcaaaagttgctgtttctgtcgcagctttagcaatatcggcaatatgattatcttgtaagtaaattgctgacgcgccgaataccgcaaagaatataaagcaaactaacgccgggacaaaaagtacacctagaataaattctttaatcgtacgtccttttgacacacgtgcaataaatatacctacaaatggtgcccaagatatccaccatgcccagtaaaagattgtccaattttgtaaccattggaatttttgaccacctgtcggaatgcgtaaactcatactaaagaaatttgcaatataattacctagaccattcgtaaatgtatttaaaatgtatagcgttggcccaacaataaaaagaccaataagtactacaaaagcaagtaacatgttgatattactcaacgttttgatacctttatcgatacctgaccatgctgaccaagtaaataatatggttgcaatgacaatcaagattacttgcatcgtgaagttactcggtacattaaataaaaaatgtaaaccttcgtttatttgcaatgcaccgaaacctaatgttgcagcaacgcctgttactgtagctatgactgccaatacatcaatggcaccacctaaaggtccacgcattgccttttcacctaataaaggcgtcaatgtagcgctgactaagccaggatatcctttatgaaagctaaaatatgcaaacactagcgcgacaataccatagactgcccatgcatgaatcccccaatggaaaaatgaaaactgcattgcatcattaattgcagattgcgtgccagctttatgaataggcgttaatttgaaggcatgactgattggttctgccgttgtccagaacacaagtcctattcccataccagcactaaataacatagcaaaccaagacggcaatgagaattcaggatcttcgccttcttcacctaatgtaatgtttgcgtatctcgaaaataaaatatacacacagacaaataaaataactaaaacgagcaataaataataccaagaaaaatgtagcgcaataaatgtagtaatgttttgcgtgagtttttctaactgtttcggaaatattgctccaaaagcaacaaatatcgtacatatcactaaagatacccaaaacactagacttactgatttatttttcataaatacaaaccctttctgtgtaatggtaagttcatacccataactgcaacattttaatcatttgtaattttatatagacacaattaataatgcctcatcttttaaaaatgatatataaaacacactcaaattatttatcattgagcaacaaagtattttattgtatttaagtaatgcctttctagtgcattattgatttgatacctgcaaagttgccatatttccgtttagaatcaatagtcgctagacacaaaaaataagtcgcctatacagtattttctgcataaggcgactttacttactaatctatatattaattactaattttccaatcattgattgtttttccaacaattgatgtgcttgatataagttttcaggtgataaaccttcaaaaacttgtgtcgttgttggttggtaatgccctgattctatatttttcgtaatatcttctaaatactcatgttgtttaatcatatcaggcgttcgatgaattggacgcgcaaacataaattcatgtgtaaatgttatactttttaattttaatgcatttaaatcttgatcttcattaaaagctacgatagtcgtaatatgccctaatggttttatcagttcaatcatagtattgtaatacaagtctgtattataggtgcaaaatatataatctactaatggaatttctttaaattgacgcactaaatcctctttatgattcaatacgatatctgcgcccatcttttcacaccactctgttgtttcttgtcgtgatgctgttgtaatgacagttaaaccataccgtttagcaatttgagtggctatactgcctacaccaccggcaccattaatgattaagacagacttcccttcgttttcagcaggattcgtagaaattttaaatgtatcaaaaaacgtttcatatgccgtaataccagttagcggtagactaaccgcttcattagcacttatgttgtgtggtgcttttgcaactatagcttctgacaccaattgatatgtcgcatttgatccttgtctatttggcgatccagcataaaatacaacgtcacccggactaaataatgtaacgtctggtccgatagcttcaacagtaccaatagcatcaaacccaagtacacgaggtgcttgagtgacttccatttgtcgttgctttgtatctacaggatttacactaatgctatttactttgactaagatatcatcgttttctggcgttggctttctttgttcgtatactttaaataaatttccttcttccaatttaaagggcttctcaaatcctatcattttcatatcgtttcacctcatttatgaacttatttcttattatacaaaatagaagccatgtgtgcttatatcgcagcatcatgactcctttttcatttgaatatataaataattacagacgactttcgtattaaattttagacttatttctaccatgttgctgaacaaatttactttagataaaaaattattaaattttggtcaattaacaaagttagtttgttaaaacgtatactttattattccgttactttaataacttgtttaccaaagttatcgccagtaaataaatttttaaatgcatgtggcgcattttcaaaaccatcttcaatggttacttgtgactgaattttaccttcttgaacccatgttgcaagctgttcactagcttctttaaaagcattagcgaattcacttaccaagaagcctctcatcattacttgcttcttaataagcgtaccttgaatacgtggtccgatatcggcttcaggatgattatatgacgaaattgcgccacatactggtacacgtgcaaaacgatttaaatgcttaaatacttcatcgccaactgttccaccaacattttcaaaataaacatcaataccatctggtactgcttgtgctaacgcttctgcaaaatcctctttcttataatcaataccagcgtcaaagcccagtgtctctgttaaataatttacttttttgtcgccacccgcaatacctactacacggcaacctttaatcttagcaatttgacctacaactgaacctacagcaccagatgcagctgaaaccacaacagtatcaccggctttaggttgtccaatatcaagcagaccatgatatgctgtttgtcctggcattcctaaaacacttaaatataaatcaagtggtacatctgtcgttggaactttagtaatttgatccgcttggacatgattaatgattcgccaaggcaacatacctacaacgacatctccttttttataatctgcgagtgtcgaatcaattacttttgcaacgacatggctaacaatcggtttaccaatttcaaaaggctgtacatacgaatctgccttagtcatacgtcctctcatatatggatccactgaaatatacagcgtttgtacaagtacaccatcgctctcaagtttaggcgtgtcaatctcttcaattttgaatgtatcctcttgaggcatgccttctggtattttgttaaaaagaatttgtttattttgcatcattaatcacctttctttatttgaaacttttacttatttgttacttaagcgttaagtttgaattgtgtcttcgtgatgtctgtatgcaaatacattcttagttgttatattttgacttaagcactgattcattcatgtaacttcaaccacattatatttgctataatcataaatttaaaatgttacgacttagacattttatggaaactctcaaacaatagataatttttgaaaagctctaatattacaagcttttttgccccagaaaaactagcagttgctttattttttccataagaagtcgattaactcattagcaacattttcattctcatgaagctgactatgttgtgcaggctcaccttcatatttagattctcgataacttttcggactatttcccagtaaatattttaatgatttcgaagaactattagacactctgccgtctgaatgtgtaccatctttcaaatccccataaatatttagcacttcgatacctttacctttataaatatcttttagcacgcgtaattgctgataaggttgattcattcgacttggtttaccatctttatcaactgtaatttcattgacatcttcattcatatttaaaacaccattaaatgtccctgcaatattcacttgtttgtttaactgtggcagtgacttgtcgttaccatatgtcatcatatattgtgcaaatgttaagttccccattgagtgaccgacaaagttgaatttatcgaaattgtattcagattgtaacttagtcagtacatttttaaaccacgcagcattcttatccaaatagccttgtctgttattttcaagttcaattttcacaataggattcactgcatcttttcttagtttccctttaaatgtcactgcaccatcctttgaaacgtaagcagtgatgatatctttagttacccctcttttttctgcttgcttcaccataaacttttcagaattggcactaccaccaaatccatgtaagaacaatgttggaattggctttttaacaaattgctgttgttgtattttaaatgtttgtgcctgtcgttgactaaacaccaccataataatagagcctataataatagcgaccgctaacaatgtcgtaataattacaaaaattttcttcacacttttaactcccattcatgtcttttatataagtataaaggatgtgattaaaaatgtcctttagttgattttgaatacatcattaacttttaagatgactttggaaagttgtccgttaacgtttgttaattgattgcttctttagctttcaatggtgtgtcacccattgattaatatataaatatgtatatgcatgtttaatttatctctttctataaataaagacctaccagcactcgactgataggccttttaatatctataattatttaatttcttttgtttcggctaactctttgtaccaataagcacttttcttaggataacgttcttgagtctcaaaatcgacatagaataaaccatatcgtttttcataaccatttgaccaagagaacacatccattaatgaccaaataaagtaacctttaacatttgcaccatctataatagcatctgcaataacgttcaaatgttgtcttacataatcaatacgtgcatcatcatgaactgttttttcagattcaataaattcatctttatatcctaaaccattttcagtgatataaatcttatgatagttaggataatctttaacaacacgcatgatttgatcatataaaccttgaggatagatcatccagtcccagtctgtgcgaggtacgtcgacatcaaattcacgttgtccgacacctttaagttggtatttagaaccgcctttatcacctgtcgcattatgcgtgatttcagattctccatcgtaacctctcatccaatcactcatgtagtaattgatacctaagaagtcgtttaaatctttggctgcatctaaaatggcataatcttcatctgtaatgtttaatttaccgccattaacagataagatatgttgcacaccttccatcgtttcacgagaatacttacctaaatatgttgcatctaagatgaatttattatggatgatatcttctaattctgctgcacgaacatcttcaggatttgatggatcgaacggatattttgttggcaatgcgtgtacaacaccaatttctcctttgtatccgccatctttaaataattttactgctctagcatgagccaccatcatgttatgatgtgattggaatactttttcaaaatcatatttaatacctggagggaatttacctactaaatattgaccatcaccaataggtccaatttcattgaatgtagtccaatattttacttctgggaattctttaaaacaatattcagcataatctacaaagtagtcaatcgttttacgatttagaaaatcgccatctttgtgtaacacttctggtgtatcaaaatgatgcaatgttacaaatggttcaacatgacgtttatgacactctgcaaataacttatggtaatactcaacacctttagggttaacttcgccatatccatttgggaagatacgagaccatgcaattgaaattcggataccattaacaccgaatttttcacttaattctaaatccactggatatctgttataaaaatcactcgctggttctgcagtgtaccaatagttttcttctaaatacgtatcccatgctacgcgacctttaccatccgtatttgtcgcaccttctgcttgatatgctgctgttgctccaccaaaaataaaatcttcaggtaatgttttagtcatatgaaaaactcctattcttaattttcaaattgttgttgaacgaaatcaagggctgcttggccatctcgtgtcaatttgatatattcagcaccttgagtcttcgctaatttaatacctaatctatctgtatcttgcttaatatcttcatagttagacgcaacttgtggcgctaaaatgattaattggtactctttcataatgtccatatgtgcgccatatccgccagctgccgctttcactggcacatgatattcttcagctgctttattaagtgcattggctaataatccacttgtaccaccaccggcacaaagtactaagacatttgtttgttctgtgatatttgaagctttagctgcatcgtctgatacaccacttgccgctaaaattgaatcagcttttttcgtatcaaagtttgctgcaactttttcttttaaatctgaattactttctttacgtccttcttcttcatcaagaatttcactatcataaacttttaggaatgggtagtaaataataatatctacaacaatcaaagtaatagctagtacgaatgaccataaaccaaaacctgtacccatgataatgcccaatggacctggtgttgtccaaggtaaattcacactaaaactattcattcctaacacttcaacgaaaagtttgaaaatccatacgttaacaattggtgctaatacaaatggaataaagaacacaggattcaatactagtggtgcaccaaataaaattggttcgtttacaccaaagaatgttggtacaactgatgcacgtccaatcgctttgtttcgtttagatttcgtcatccacataaacatgaacgggacgaccaatgttgcacccgtacctccaaatgtaacgataaacatttgtgtacctgatgtaataattttatctgcgtgttctccagcttgaagcaacttgaagttcgcttcgatattcgcatatgtaatggctgcaattgctggctctacaattgacggaccatgaatacctacaaaccagaataatgcaaaggcaccaaagataattgtgacaccaatccatccatctgctgctgtaaataatggttcgaataattttaaaataccttccgctacatttgatttaaagctgttgcgaatgactaaatctaatgcataaagaatgatgattaccgctgaaaatggaattaagtccttaaatacttgtgaaatattcggcggtacttctttcggcattttaattgtaatattgcgcttcacacagaagttataaacaataacagttacaaatgctgataagaatgctgttaataaacctttagttcccataaatgcacttaagaatccaccatctttggctggatcagaagctaagaacaagaatccacacatcgctgctagcattgtagaaataaagttaatttgatttgtactttctagcttacggttaaatgaatctgttaaagatttcgctgtcgttcctgctactaaaaatgctacaagccccatcgtatagttatatggtttcattaaaatggcttccatgcctttatcccatttaaaaccaaatatatttggcacatatgcaattaatagaaagatacttgagaataagatgacaggcattgcagaaataaatccatcacggatggctcttaaatatatgttacgtgataatttctcgaaaaatggcttccctttttcaatttgtgcgatcaatttttgcatcattgtcatcaccctcttttataaaattctaataaatgcttcattaaatctttcagtaaaattgttgtcattaaatgatcttgaccatgcatcatcgttacactgtatgcaatatcatcaccttgcgcttctttagccaacaggcttgtttgtgctctatgcgcttccgcaatgcaattgtttccttcttcaatcagtgcatctgcttttgcaaaatctccagcttgagctgctgttaatgcttctaaaaacttagaacgtgcatcccctgcaaatgcaacaatttcaaaacctaataattggacttcttctctattcatagcattaatccccttttaaacttattttctttgtttccaagatgtcgcagtatcttttaatactttatttaagtcatcaatatttttgaaaccagttgtacgtaaccattcacgagcagcatcttcaccttgttcaatgtatacttgaacagcaccagaccatgtagcacggccacaaagtaccccgttgaatttagcaccagcttcgtgagcaaattttaaagtttcttggaataattccgcagaaacaccagcacttaagtaaatgtatggtaaatgagttgctgcatcttgatctttaaagtgttgtgccgcttcctcttttgtataaaccacttcaccttcagcaaagccttctacatatttcatgtttactggtacttcaactttcaatacatcaacgttaaagcgtggttctgagaataatttcattgcttcgttaacctttctaggcttaacttttgcgaattcaacactaccgttatcaggaatgttgtcatcgtatgttaatacttctaaaaagaatggaatatcttctgcaacacattctgaaccgattctttcaatgtatgctttcttttgaatgttaatttcttcagcatcatcaacatcatagtaaagtaagaatttaacagcatttgcgccttgttcttttaaacgttttgcagaccactctactaaacagtcaggtaaacgacctttagcgtttacgtcatatccagttttttcataagcaagtaataatccacaatctttgttacgtgcatctgaagctggtaaaccatattcaggatctaataaaattgaagatgcatattgtgttaattcttccgcaactaatacttttaattgttcaatttgagctacagttggttcttcagtttgatgttttgccatcatgcgttttaaagcaccacgttggtcaaatgctaatgcagaaatgataccttcgttgttacttaattgttcaattgatgcgattttttgattcgattttgacattttttacacctctaaaacttcaatttgattgaataaatcatcataattatttaaattgacataacctgtttgtgcttcttgtgcattcagcatgcctaaagtattggctttttttagtaaatcgtggtcgttttcatgattaagaattgctgaagtaattccagcaactgtagaatcacctgaaccaaccggatttaatacacttattgtcggaatattcactctatagaatgtatgattgtgcttagcgaatgcaccttgtgcacctaaagacacaataatccactcaatcccttcgaataagggttgtgacactgcctgtttcaaactttctaaactttcatcaagtggctggttaagcaattgatatagttcagaaatgtttggtttaatgactgtaggtttgtatggattttccaaaactgtttgcaaagttgcacccgagcaatctaatatcacaggcacacctttgttttggcatcgttcaatgatttgtgcataataatcttgatttaatcctttaggtaagctacctgaaatagcaactgcttcaactttttctaataattgttcaaaatgtttaataaatcctgcagcctcttgattatcaatctccggtccctgctctaaaatttctgtttgttgcccttcatgtaaaattgcaatgcagtttcgtgtttcacccttaatgttataaaatgcatgcttgatgtcggcatgatctaattttttagcaataaattgacctaattcaccgccaataaaaccactcgcaaggactggctcacctacttgcgcaagtactcttgttacatttaaacctttaccaccagctgttttacttacttcttgaacacgattaacatcatctaatttcaatgctgttaatgggtatgaaatatcaacggatggatttaatgttaaagttaaaatcatatgtgtcgtcccttaatcgtggtattcgcctctgtcccatttttctaagaattcatcaaagaaatgtggatcagcttgatctgcattgcttgtttctaaatgtttaattttagcgattaattttttgttctcttcagttggtttatattcagcattaataaatgcatcgataatatcgcacattaataactcacctataatacgtccaccgaagccaataacgttcgcatttaattcttctttagcgtataacgctgatgtcatatcacgtactagtgctgaacgaacgccaggtactttatttacagcattgttaataccaacacctgttccacaaatacaaacacctaagtctgcattaccgctaacaacttgttcgccaacttttttaccaaaaattggataatgtgttcttgtgaaatcgtatgttcctacgtcaatgacttcatgtccttttgattttaaaaattcagatacacgcatttttgtatctgtaacaatatggtcgcatcctaatgcaatcttcatagtaatttttcctccttagcacattttattaagcatatctacgcggatttggtgtctaccaccatcgtatttaccttcaacaaaacctttaacgacatttttcgctaatgtgtctccaacaatttcagatcccatagtgatcattcttgaattgttatggcctctagtcatatatccagagcgttcatctgatacttcagcagcaatcatgcctttgatttttgtagcaaccataaagctacctgcaccaaatgcatcgataacaatacctaagttaccttcttgactttgaacatcttttgctacagccaaagttgcatcaacaaagtcaacttcctgtccttctgttacgtcaacaacatcatatttattgtctaataagtatgatttgatgacttcttttaatcgtttgccagcttcatctgaaccaataataatcgccataataagactcctttttactttaattttgaaatacctttcttaaaatgtgacatatttatttgtaggttatgaaaatcttgagaaaaggctttcaatttgattacgtttaaattataaacataaacaaacaataaatcaacataatatgtttataatatgtttgtttatgacgtattttcaaacaataagtgaacattcatattgtggtgttgttttaattaggtattcgtctgaaattgtagtaaaactttgtcgaggttcccgttgacataaatttgcataaaaaatagcccataaatgaatgcaaattcacattcacttatgagcatatagatacatattttaacaatgcagttatacttttaatttagtcgactacttcaatatatgttttaatcgtttctactttttcttcatcttcatagtccatgaccactgcagtcaattcgtttaactgacaaaatgatgtaaaatcttctttgccaactttcgtatgatcgattaacaagtatttttcaattgaattacttagtgccagttgttgcgtataggcttcatctaatgtagatgtcatcacagcacctttatttactgcgttactactaaagaacatcttgctaaatcttagtttttccaacatggcgttcgccatttcacctacaaatgcttctgtaatatggcgcatttcaccaccaattaaatagacacgaaaatgtgctgtttgtttttctaacaaaattttatacaccggcaaacaattcgtaataattgtgagcgtatgatgattgacttcttctgctaatagttccactgttgttcctggtccgaaaaacaaagtatccccatcttcaattaatgatgcagcttttttagctataaatcgtttttctgcaatttgacgggtatgtttttctttatgcgatatttctttatactgaaatgttgaattactgcgtgcaccaccatgaatcttcgttaaaatccctttattttccaattcaattaaatctcttcgaactgtcatatcagacacatttaaaccttcgacgatttcattcgttcttatcgtgccctttttattcactagtttagcaatttcgtccaaacgttcatgtttattcaatgtaaaattgcctcctttatttaggcgatgggtcattatcctttatgtttagacatcaattttaatatacatgcttattctataataaaaattgcgtaaaaactaatataatttaactgttcgattatatgtataattcatttttaaaaagaactgtttaaactgcgcttttgataatcgtaaaatgaatatactataataaaagtaaaagacgttataaatcattcattattttgatggggtgtttaacttgaaacatgatttagagacactaaaacatattatagatagttcgaatcgtattacattttttacaggtgctggtgtatctgtcgcaagtggcgttccagatttccgttcaatgggtggcttatttgatgaaatttcaaaagatgggctttcgccagaatacttgttaagccgtgattatttagaagatgatcctgaaggttttatcaatttctgccataagcgcttactatttgtcgatacgatgcccaatatcgttcatgattggattgcaaaattagaacgtaatcaacaatctttaggtgtcatcacgcaaaatatcgatggtttgcactcagacgctggaagtcaacatgttgatgaattacatggcacgttaaatcgtttttattgtaatgtatgtcataaatcttatacgaagtcagatgttattgatagaactttgaaacattgtgataattgtggtggtgccattcgaccggacatcgtattatacggtgaaatgttagatcaacctaccatcataagggcattaaataaaattgaacatgctgacacccttgttgtactaggttcatcactcgttgtacaacctgccgcaggattaatatcacattttaaaggcgacaatttaattattatcaataaagatcgaacaccttatgatagcgacgctactttggtcatacatgacgacatggtttccgttgtaaaatcattaatgacagagtaatcagtatgtaaaaagcatttcccgaatggtagggaaatgcttttaattttggagttgcgtttttggaatttggagtttggttttcggaattcgacatttggaattcagaattataatgagtggaaaattttaattattgcgtgtttaatgacttggttttgtagcgatttttatttgatgaattgtttttttgtttgatgttgggatgctacttttaatggtttgtcatttgtaagattaaaaataaacataaaataagtagaaaaataaaagctacgaatattaaaaaattagatatcttcattatcaaattccgatattaaatcattatatttttcagaatatcttgcataatcttcattattattaaaagctagccatagacctctatcatcatataaatgatatattaagtttttagtattgttaattatatatatttcagaataattatcattctgattgatatttggaactaaccctttaaagtcttgattggatatagcttttaataattttttatattttatatcttttatggaacacttatatgaaaactcctcgcacaaaatattatcatccttctcctttttatattctttaaagtaatacaattcatctattgttaacgatgtaaatttttttataacatttgttttcttataaggttcactataaacatatactacatgaaccaaatttatagaatcagaaggcgaaaacaaatcttcaaaaatgtttattgcattatcatatacagctaaaaaataagtattattgatagttttaccgtcctccaaaaactggtatttatcgccacttaaacttaaatgaattgcgttttttacctttctaaaattcaacttttttatatccaaattatttatatcaaagcacataatttacaacaccttattcccttaagatttttccttctttagttaaagaagctattctttttcctttgttatttattaacttccaataagaaccaccatgtgattgccctttatttttggaaatagtccatttagtttttgaatctctccaggtaggatttttcccttaaaccttttgagtaaattcaccaatactcatccccttatcatttaacaaacttttattaatgtttttggttatattatgagtctttactgcttttagattgtaaaaattatcgtcataaatagtggcattttccgagattcaaatggtacaaagtacattgtaatatgcataatgatacctgtaattaatgtaataatagaaaagtgtatatatctcatatcgccacctgctatacaacttattaaataattaattccaagacatattaattatctaattataaccttagttacgttattacataatataaaaatatataataacttatttgcttgctcctttcactttttaagagtaaaaaataacctgaaacatagactttaacatccaagtttcaggttagtgtaatgtaaatgatttactttgttatattatgattaaacatctaattctctgcttgtaagtgctttaatcatctctggatcagcatgtgagaaaaattggctattactttcttctaatgtcgcaatttgttgtttatcttcttctgtaagttcaaaatcaaatatatctaagttttgagccatacgttctggatttactgattttgcgagtacaacaatgtcacgttctactaaccagcgtaaaataacttgtgcaattgatttgttgtatttatctgcaatggcctgcaacaattgattttggaataattgatttttaccttctgcaaatggtgcccaagcttctaccacaacattttcttgttgaagtgctgcaacttgttcttcttgttgatggaatggattaatttctatttggttcacttgtggttgaatttgattgtgaatacctaaatctacaattcgatcaacgccgaagttagatacaccgattgctttaattttaccattttcttttaactcttctaatgcacgccatgagccatatacgtcattgtaaggttggtgaataagcactagatcaagatagtccaaatttaatcgttgtaatgatcgttcgattgatttgatagtatcttcatagttaacattttcaatccatactttagtcgtaatgaatagttcacttctatcaatacctgaagcttcaataccttgacctacttcagtttcatttaaataactttgtgctgtatcaatatgtctataacccgctttaattgcttctttaaccgcttctgctgtttgttcttgaggaatttgaaatactccgaaacctaatactggtatctttacatctttacttatttcaatatgattcataaaatgaacctcctttatcttgtatgtccactataaaccatggagcgaactctatagcaagccataggtttactttctctcccaaagacgttcaacattgtcatcataattatcactagcattgattttagcaatatgattatcataattatcaattttatattgtagtaaatctctcgcatcatgaattgtctttaagttttcatttaattcttcgagttgcttatttaaaatttgcttttgctgtgcttgaatattttcatttttaggaagctgcgctaacctgcaaaattcgataagcgattcaatactgacgcctgcatttcgcaaatttttcactaaataaatccaatttaaatcactatcattatatattctatatccattttcatctcgattaactggtggaatcacaccaaccttttcataatatcttaaagtgtcttgagatatattcatgagcgctacgacttctttagttttcattgcgactatcctttcagttatgtttggtcgtctaaagtaatgttgctttatatattgtcatcttcgtttgaatacttcttattttattactcaaatttaaatttgtctcttttttaacattttacatttcatcgtttttaattactttaaaaattgtataacttaaatatttaaaatgatataatcactaagattgataatatttaattttttgaaaattattttagttgcaatttttgggtgatgcggaaaatttgggtgatcgattgtttatatgcatcaacattctttgtggattgtttgacagtagacagtcatttgtatacgttaacgaattttgaaaaattgaatcattatttaatcataatattcattgcgcacgcgcaacacaaaaaggagacatgtcaatgacatatagaataaagaaatggcaaaaattatccaccattacgttattaatggctggtgtgattactttgaatggtggtgaattcagaagtgttgataaacatcaaatcgctgtggctgatacgaatgttcaaacgccagattatgaaaaattgaggaacacatggctggacgttaactatggttatgataagtatgatgagaataatccagatatgaagaagaagtttgatgctacagagaaagaggcgacgaatttactcaaggaaatgaaaactgaaagtggtaggaaatacttgtggtcaggagcggaaacccttgaaactaattcttctcatatgactcgtacctatcgtaatattgagaaaatcgcagaagcgatgaggaatcctaaaaccactttaaatactgacgaaaataagaagaaagtgaaagatgcccttgagtggctgcataaaaatgcatatggaaaagaaccagataaaaaagtaaaagaattaagtgagaattttactaaaacaactggcaagaataccaacttaaattggtgggattatgaaattggaacacctaaatcattaacaaatacgcttatattgctgaatgatcaattttcaaatgaagaaaagaaaaaattcactgcccctattaaaactttcgccccagatagtgacaaaatattatcttctgtaggaaaagctgaacttgctaaaggcggaaatctagtagacatttctaaggtgaaacttttagaatgtattatcgaagaagataaagatatgatgaaaaagtctatagattcatttaataaagtcttcacttacgttcaagattctgccactggtaaagaacgtaatggattttataaagatggctcttacattgatcatcaagacgttccatacactggtgcttatggcgttgtactcttagaggggatttctcaaatgatgccgatgataaaagaaacaccttttaatgataaaacccaaaatgatacaaccttaaagtcatggattgacgacggatttatgccactcatttataaaggtgaaatgatggatttatcacgaggtagagctatcagtcgtgaaaatgaaaccagtcactcagcatctgcaacagtaatgaaatcattgttgagattaagtgatgccatggatgattcaacaaaagctaagtataaaaagattgtcaaatcttcagtagagtcagattcaagttataaacaaaatgattatttaaattcatattcggacatagataaaatgaagtctttaatgacagataacagtatttctaaaaacggattaacacaacaacttaaaatatataatgacatggatcgtgtcacctatcataacaaagacttagactttgcatttggtttaagtatgacgtcgaaaaacgtagcacgctatgaaagtatcaacggagagaatttaaaaggttggcacactggtgctggaatgtcttatttatataacagcgatgtcaaacactatcatgataacttctgggtgacagccgatatgaaacgtttatcaggtacaacaactttagacaatgaaatattaaaagatacggatgataaaaagtcgagtaaaacttttgttggcggaacaaaagttgatgaccaacatgctagtatcggaatggattttgaaaatcaggacaaaactttaactgccaaaaaatcatatttcatattaaacgataaaattgtcttcttaggaactggcattaaaagtactgattcatcaaagaatccagttacaacgattgaaaatcgcaaagcgaatgggtatacgttatatacagacgataaacaaacaaccaattctgataatcaggaaaacaattcagtctttttagagtccacagataccaaaaagaacatcggttatcattttttaaacaaaccgaaaataactgtaaaaaaagaaagtcatactggtaagtggaaagaaataaataaaagtcaaaaggatacacaaaaaactgatgagtattatgaagtaactcaaaagcattctaattctgacaataaatatggatatgtgttgtatccaggcttatctaaagatgtctttaagacaaaaaaagatgaagtaactgtcgttaagcaagaagatgacttccacgttgtgaaagataatgaatcggtttgggctggtgttaattatagtaatagcactcaaacttttgacattaacaacactaaagtcgaagttaaagccaaaggtatgtttatacttaaaaagaaagatgataacacttatgaatgtagcttctataatcctgaatctacaaattccgcttcagatattgaatctaaaatttcaatgaccggttactctattacaaacaaaaatacgtcgacttctaatgaatccggcgtgcactttgaattaactaaataagcaagaaaatctcgacactataccatttttatagtgtcgagattttataagtatcgccatcattcagcttgtaatccgcagaccacatcccctttgataagttctcgattatttataaatcgaatttttaaagatgtacatgcttcaatattcttatcattcattacttgaaaatgtatatgaggttcagtagaattgccagaattcccaaccttcccaatgatatcaccatatttaacattttgcccctcattcacaatgattgaatattggtgtaaatgagctattaagctatactcattttctgcgtgcttaattacaatataatttcctaaaaactgtgattcattcgtacttccaatactgttgtcttgaaccccattcactactttttcaactgtaccatttgctggcgcaatgatatcttttccaaaacaaaaataatcagtatttacttttccttgattcttatatgttttatgattttctttaataactaaatcaatagcatacctttgatgtgggtataaatagtgataattatataattcattatctccaccccaaaaaatctcatagcaatctgttgtcggcactgcgtattttaaagtcgtttcattcttaatcgcatcataattaattaacggacgcataacaaatccgataatactattatctttccaagtcactgacactccaaattgatttgcttcatctatccatatttgctcaatagtaccatcattttgagtacacacttttaattcatgtacatcagactgccttgtataagatttgaaaagtttcctaaactgccaataactaaactctcgcttcaaattttgatcaaaaatcttatatattttcctgctcttacttttatttaaataagccccaaagtttgttttattcatatatacttaacctattatattaattttggtatcaattctttctccagttcctgcgtcatttttgcgctacctgaatcgtctacacttaattggataaatcaacatataaataattttttaaagctaaagtgtagtcgattcaccatattttctaatcatcccttaaatattaatatttgcacttaaaaagtatacatatcactcaactaatcaataatcatacttaccttcaacaaattctttaacatgcagtgttatcccttgataatatggatattttgttaatctaaatttctgctttaatgcttcatctctactattcgacatcaaatatgcatgttcaagatagcttaaatatgcttcgtcattgccgctatctccaaaacctaatattgattttactggtatattatatttcctcatcagaaattgagtagcatataattttccagcatttgacggtgtgaagtcaatatcatacgcattttcaggatcaccagctaatggattgcttcgactaaatctcgctgtatagttttggtcatttgcgtatctgacaagtgcttctaggatacgactatcattgttgtgattacctgttgaatgaaaataaaaattataatgtgtttcattaccttcaaatgctctttgtggaataaattcgacattatattgcgcagaaatatgacgtaatatatcttcaatatcttcaaataaaaatggttcgctcaagactttctttttatatgtttctgattcaacatattcgccattattccaagtgaacattttagaactcaaatcagaaaagatatgtaatggtttaaacgtcatattaacttgatccattttatccatgacactttgaaatgtacttcctgtcaatacagcagtgatcacttcattattattagttagtttttccaacaatttttccatttctcttaaatgacttaaatcttcttcatttgtattatgtttaaaatatgtttcatcaaaatcaaacaataatagacgctttgacatactcattcccccataatattttaatgaatttatctataacttaaatacactataagtctcaattaaaagtataagatcgactatatgcttttcatgattattatatacaactaatcaatccctataaactaaaaacattgcttaccacttttcaaaatgcacgagtcatatccctcgttaaaaactattactaaaaattaaaatataaaaaatgcaaaaagtatgttttaaactttatgaaacgtgttatacaaatagtgtaatatcatacaacccgaaaaggagattgagatatgaaactaaaatcatttgttactgccactttagcattgggattattatcaacggtcggagctgcattaccgagtcacgaagcatctgcagatagtaataacggctataaagaaatgactgtggatggttatcacactgttccttacacaatttcagtagatggtattactgcattacatcgaacttactttatcttcccagaaaataaaaatgttctttatcaagaaattgacagtaaagtaaaaaatgaattagcttctcaacgtggtgttacaacagaaaaaattaataatgcccaaacagcaacttatacgcttactttgaatgatggtaataaaaaagtagtgaatctaaagaaaaatgacgacgctaaaaattcaattgatccaagtacaatcaaacagatacaaattgtagttaaataataatttgaaaatagttttatagggcaagcgctgaaaaattggcgtttgtctttttagttattgaacttgtaaattattgttgtttgcttctcgtagtaacagattggcctatacaatagtaaattttatatgagtgtgtaccacaatttataatctaaacataacagcaaatctcaaatatctggaacctaataaatcccctcactactgctaatagtgaagggatttattttattacttagacgtaattataaatatatttgttctattgtagtcatggttaatcatatttacaaactatcatttctaaatcgcgcattatgaagtcaattttcataaaccgtcattatatttctggattcattattcagcttctctaatttcgtctgcaatatctttatagtcaatatttgctttagtgaaatctttatcttgaattggaaaatgctgttcaaatgtttctatattttggatttctactttaacatcttctacttcaaaatctaagacatgtccaccaaagttacgatcatcattcgcaaagtgtacatgaaatcctgctgatccgataccatggaataattctggtgtaaagaaaccaacgactgaacctttgacatacgtttcagtttgttcaggttgtcttctagctgaatcgattaaacgtgtataaggtggttcttgagccggcatcatacgtacatgcatttttttaaataagcctgaaatttttactgctgaaaataaattttcactcaacatcttttccttaatttctgcaaaaactgcttctgaagatttatctttcgtttcatagcttgtatctgctacaaatttagttacagttgcatatggtgttaactcgtcaccttttaattctacaaattctttatgttcatttgcatggtaagcttttccatctaaaaagattacctcaccgtttgaacctgttagtgtagcgatacctaagtcaccatgttgcaataattcatttattgatgcagttccttttaataatcctgccattaatgtgcctaatgtaccatgttggtataaaacattagtcataaaatctcccactcctctttaacatttatctttattttagttaaatacgtcaggtaacatatttgttgaaagtttgatattatctttgtaatttacaggtatatcaattaatactggaccatctgtttcatagccctctttaattgccgcttctaattcttcttgattagtaactcgtaaacctttcgcgccaaatgattctgcatattttacaaaatctacaggaccgaagtctacacctgacgaacgtttatatttcatttcttcttggaattcaaccatgttatattttccatcattccaaataagctggatgatatttaaatttttacgtacggccgtttctaaatcttgtgatgaaaataaaaagccaccatcgccagcaacggacacaacttgcgtattagggcgcacaagtgcagctgaaattgcccacggtaatgctacaccaagcgtttgcataccattgctaaataataaatgtcttggattgtaacttctgaaattacgtgccatccaaatatagtgacttccaacatcaactgttacagtagtatcatcagttaataccttttgcatagattcaataatttccactggatgtagaattccttcttcatgcgtcgctttaataccagtttcttcatcaatatgtgttcttaattgttctaattcgtctaaatgttgttgatttataaatggctcatccactttttcagaaatcatttcaatcgttttagcaatattaccaatcaactcttttttcggttgcatataattagtaatttcagcttgaacttcgtcaatattgataatttgtgtttctaattctttattccagttactagcttcgtattcaattggatcataaccgattgtaacaactaaatcacttttacgtaataattcatcaccaacttgattgcggaataagcccacacgaccgaagaaatgattttctaattcacgactaattacacctgcaccttggaatgtttctacaactggtaaattcgtgcgctcaactaatttgcgaatggcatttgtttcttctgcacttgaacttctcataccagctaataaaacaggaaatgatgcatttttaatcgcttcaatgacatcattaatatcttgttcactcggtactcctaaatttgttttttggcaaagtgatatagctttagattcaactggtgaagaaataacgtcttgcggaatactaataaaacttgcgccattttttcctgaagtagcaattcgaattgcatttgtcataacttctgataatgattcaggatcttgtacttcttcactatattttgatgaatattttaatagcgcagcattatcaatactttgatgcgttaatcgtaataaatcattacgtttcacttggccacctaacgctaatacaggatccccttcagatgttgcggttaataatccagtagttaaattacttacaccaggaccacttgtaacaagtactacacccggtttgcctgttaatcttccaataccttgcgccatcattgcggcgttttgttcatgacgagtgacaataagttcaggaccatcatcaattaaagcattaaatagatagtcaatctttgcacccggaataccaaaaacatattctaccccattatttttcaaagtatcaataaccatatcggctgcagtgtactttttatcagtcatttatattcatttcccttcaaatgtgatgtatagatgtgtattacatgtaattactttgtgatttgtaatctaatgatagttacgcaaaattaatgatgtttatcaaaattttacatgtacgattagatttgtaatacataaaaattgccttcagtacattatataacctttgttagatgaataaaaatcgttatttgtaatactaagtattccaaaaatgcatgaatagattttgtgcgttgtgattatgagggatgttggattgattgatgtagaggattgttacgatatttttgggatgtggtgtttagtcaatggcgggctgaaattgtcgttttatggtgggctgaaaatgctgttttatgtcgggcttgaatttgtcgttttatggagatataaaaagccacagcaagacttagatctaactgtgacttatacatttcatacttatatttatcgattggttttatagttataaatgatagaagcagttcctaaacaaattaagaagatactcattaaatatatagaaaagttatctgttttaatataaaacctaaaaagtagaaacaccagcatcgcaacaataaaataaacaggaataaaagctttcttccaaaatatagaatctttcaattaagtcactccttattttgataacactcttaaatcatggttcttgagttatcatctggttatcatccgatagctctttcccttgaatatctattattagaacactatcgtacggtctccgcaagctaaatgacaatttaataatgtacacttttgattgtgtaagcatgtacaaattatacgtgtaaatcaataattcatagttgaattaattctatacctgagacattaattcatttatactctattccatattccccacacaaacgcaaaaaaacacctcgacataacatcgaggtgttttgtatatatatcgtccgacaattaacgttttgagaattgaggtgaacgacgagctgctttaagaatttgtttttttacgttcagaaaattttagaatttcgcatgattatatagactgtcgtacaccttgatattaaaggatttcttcaattttgaatttcattgattttcatcaaattgaagcaaagggtattaacggggtattaattttttaaaaaaatctgctggtcggtggattcaataattgatcttatttactgtatttgacttctatacttttgaaaaaattttctatatcaactttatccatatttaaaatatctttattgaacacacaatgcaaatatggttttgcagaaaaaaaagtattgccttcacttatcagttgataattaacatccttaaaatttaaataaataataataccatcattttctttggctaaattctttattttcgaagaagataaagaattaaactcctcattcacatgttgtttattatattctggtttaaaaaatgtaattaatgatatctctgataaatcaatatattctttattaggtatactttgctctaaaattctttttaatcgagacacagcctctttaccatattggtttgtaatataaatattgtcaggctgtatcttgtaaaatattaagacagtctttctattttctggctgataagtcataatttcttgtaatttttcatgacctttccctattctatcaatgacatttctattaccctctgtaccaaaagattgcccaatatataaattagtaatttttaatgtagtatcatctctgtttgtaaaatattcattatattttttataccccattatgttccaaacgtcttcagagaatacttttatcaaattatcactatatttataaacttcagagtaatatactttatccaatacaacgttttttttatattgttcaaatacttttgagtacatactacaatcatcagatatttttttatcatacgaggatattaaactttctatttttttatgaattaacaatttttgaacatttaattttttaaataattcatcaatatattttttccatacttctttgaaatttatttcattttctagatatttcattaaaatttcattaaaactatctaagctctctctatattctgatgattcgatttttgtattgaattcttctttaacatagttagaagaaaaaacaatttcaaatattggtttaataaataaaatataaaaaccatactctacatcaaacttgttttcgaataaatgttttacaattttctccaattcaccacttaagtatacctcaatattgtaaccattaattttatacttcaaatcatcatctcttatatcatttaattcaaatatatctcttctgaatataatattctcatgtatatactttgaaatgtcaaatatacaatctttatttgttttcgtatttaatatagatattcttcctctatcaagtaatttcattgtatattcatctacatagttgaaggaatataaatataaaggtagcttagattttaagaaaaattcttcttccttcattttataaaagtcttccattgttattattttagtacctattaactctacatttaaaaaattactattattcatttaatttacctttatatattaattaaattttaaaattattaaactcttaacttatactacttacaaccttacatagatagtactttattaatagataacttatactaaaaaaatataaagcatataaattaatctataatatccgtattaaataattcatcttcaaaaattattgtataaatatcatttgttattattttctttaaatacctaatgttatcgatatctatttctgtctctttatatttctctaacaagttatatgcggtaactattcttttttctttttcatttagagatgatagtatttcatttaatttattttctattactttctgcttttcttcctgtgttaaatataaaaatttaatacaggaatctattctagaaaataccggttctccaatattaactattgcttcttcaatactattaaaattagatgttagaatgaaaatacaatttgaaacgtctactttataattggcatcttcaataataccttcatcaaacatttgatagaaaacattgtaatagattggtaataccttatcaaattcatcaattaaaacaacattagtttcacgatctactaaatcttttgacaatgatactttggcatgttcatctccaaagatataattaaaagattcatcattctgcatcatagaaaattgtattctagtgatattacctttatatttttttgctatttctttggctaattctgtttttccaacacctgatggaccatagtaaagcattacggtcggtttattattttctaaggaagtatgtttatataaatctatgctcatttgttttttagcgtctgtttgacctattattttagaaccagccatctgctctttataaaaatttattacatcatctttttttaatgttgtatattcatagtttatttctattatttcagaatcgtgaaaactatttagtgattgaaatactctttttggaggattctgaatatagattttcttaatatttctacctaaagtaacgatatttataaaattagtaataacatgagttgttacagaagcaaagtcgtttgaaaatatcacaagattttctatctcagtatcaaaaataccgtcaacatcatgagttccaaatgtatcacttgctcgcactatgatattgtattctctgattaattccatgaagcggtgatattctttaacttcagaattaatatattcattaaatccacaaagcggtcccgtataaacatgaatttccatttatttcactcctgcaagaataacatcatacacttgatatttatcttctttagttgcttctgatgctaattcccttaaactttccaattccactaggtttggcaccttgatttagatcaaactctttatcgtaatttagattttctttgcttatttcaccaacaagtactgagtagagtgttaaattcataaattttaaatcttgtattctatagttatttttaaaagattctatattaaatctaaaaactctgttttcattccctcttgttcctattaattcaaaatagcctttaatacttctaatcgcttcattcatttttgaaacatcaaatgatagctcctcctcgtctagatgtttagatccttcaaacatacttgctatgggggtaatagtcgcgaaatatgtcatcgtatcttgttgaatatttagtttaaacccctctgaaatatcaataatagtttttttctttctaaactctactgtatccaaaaaatcatatattaatgtattctctaaaattgttttggctactcgctctccagttatatttccatttatacctgcactagccgaagcactcgctgacatcccaagtaaagaatcaaaaatttgttttacagcgctttgcttaccaaattccatgttcactttagattcaccacttgcactacctttttcatcatgcatcaactgaactgttttagtaaggttacctttcttctctatctgtaataaatccattgctgatagttcatcaaaataaattatttttttgatagtatttgtcaatatatcctctccttaatctaatacttcaaaatctggtaatttatctattaatccaagagttttcatacttacagtaataactgataaaagcagatttaaaatgtaattcggatcttcactaaattcattaggatcatctaatattccagatttcttgtcgatgcttacgttgtactgatctataatccattcaatagcaggcttgccattcacaatataattatatactttatttggaatgttagtaactgtaatatcggtattgtatattactgtatccaacacgccctttttagggtgcttcatttttcaactttataattcggattcatattattataaattatttctacaccatcccaattgagttgtttttcataatttaaatgtaattccactaactccctaccaatttcaacaaatccatatacatcctttaatatcggtattcgcggaaaacctttactcaaatcacttgaatatttgttcacataatatttatgatgcaaaattgcatatatataatatactatctcttctgaattaagatttattttctttttaaaagaattagaaatattatctacaagcctcaaactatctttacctttgtatgtagcaaagcctttgccattaccaataaattggaaattaggtaatatgtccgtgatcatagccgagaattctttattcattccctgtccttgtatataaatcacctgtccagtattctccattatattataatatctacttggcatttccataatatttttgtcgtacactatccatttttttgtaaatggtctatgcataaatttaacaattctctctggattaattgaaatattttttcctttagaaaatttttgggtaagtcctcgtgtccaactaataaatgtttcatctttgttcactaaatttatacgttctcttgaatctaagatatcaattaatctatctatttcagaattatagttatctacaagtaattttgcatttactaatgctttttcattcgaaaaatttgttacccaattatctcttgctgaatttactccattaaattgatctaaatatatagaattttcaatatccttggaatcatacattggtaaataattctcatagtttatgtctcgttgattaatccaatcattgtttttatcgggtaaaacattcaaacttttcaaattcacaattgattgatgtttcattaaagtatctaatttttgctctctagttaaatattcaccaatgtcattataatagatatcgtgattgtaacttccatctttaactaaaatagatatagctatcggtgctctacttcctgatccaaatatttttccaccttcttttcttgatttttcaccctgtgttcgttggtcgcctctcaaattaattatgtacagatagttaaattcatcgtataaaacttttctaaatccatcagtgctttgactatcaataaatgatccatttgttacaaatcctataataccttttttccaactctatcagttgcccatcgaaaagcctgtatatacgaatcatataatgatttttttaaatttgctgttgaaaaatttgcataggtatttgctatttttgcatttaatttttcatattcatttttttattatcattatttacactagattgaccagcagaatacggtgtatttccaattatgacagtaatattttctttttgttgtttttttaaccttttatcgtttagagtaaagtattcaaatcacttcacttccaaaaaaataacagaatatcaactatttattgttctccacatttcatggttcttcatcttttatggtgggaaggtaaaaattcatttatattctacacattccatattcgccgcaaaaacgcaaaaaaacacctcgacataatatcgaggtgttttgtatatatcgtccgacaattaacgttttgagaattgaggtgaacgacgagctgctttaagacctggttttttacgttctttcatacgtgggtcacgagtaagtaatccagcgcgttttaaagaacctctgtattcaggatctgcttctaataatgcacgagcgattccgtgacggatagcttgagcttgtccagtgaaaccaccaccatgaacgttaactaaaacatcatagttacctttagtttcagttacatcaaatggttggtttaagtctaaaattaatgattcgaatggtaagtattcgcgtacgtcacggttattaactgtgatgttaccttcacctggtactaaacgtacacgtgctactgagtttttacgacggcctgtgcctctatattcaacttgtgccaaagtcatttcctccttctaattaaccacgtaattcgtagttttctggttgttgtgcagcgtgtggatgttcagcgccaccatatacaaataattttttaccttgtttttcgcctaaacgagtgcttggtaacatacctttaattgagttttcaattaaacgttctgggttagttcttcttaattcaccagcagtgattgatttgataccacctgggtgatttgagtgacggtagtaaactttgtcagtttctttgttaccagtaaattcgatttttgatgcattaataacgattacataatcaccagtatcaacgtgtggtgtgtaagttactttatttttaccgcgtaagatagatgctacttctgatgataaacgacctaatgtttggccttcagcatcgataacataccatttgcgctcaatgtttgattcatttgccataaatgtttgacgcataataattgtcctcctaaaaaataaatgcttctattcaagctataaacagtttcataacctaatagatgatttcatttgtttcatttttaaaacgtttaatttcatttattttgttaactgttgttcgtttctgcttatatatcttgtaacacaataagtttccggggcttatcgtggggtggatataaaacaataccgttaataatcttataatttcacaagctttttgtcaatggcaatcagtcattttgtaatgattttttacgatgtattttgatatcgttaccaaagtcttttaataactcattttcatctaaataaattttctctaaatataatccttcagccggtgcagtgaaaggtacattcttacgattctttgattcaagaagttttggtacatcagatacttcatgtcgcccttttccaacttctattaaaaatgcaactaagacacgcaccatgttatataaaaatccagatccagtgacaatataatcaaagccatcatctgtctttacgatttcactttggtataatgttctaactttgctttctacttcagttttttgcgaacaaaatcccgtaaaatcatgtgtacctatgaattgttgcgccgctctgttcattttacctaaatccaacgtttcaggaataaatgttttcaaaccactttgaaatggatcgcggtgttgtgcttgatatactttgtagcgataacgtttacctacacaatcataacgacaatgaaaatcgtcatcgactgtaactacattgttgacataaatatcatcaggtaacgttcggttcattgcatattgccattgtgacataggtatattcagctctgtgtcgaaatgaaagtattgctgtatcgcatgtacacctctatcagtcctacttgaaggatggattctcacatgtcttttatgcatgcgttgtaatagcttttcaaattgttgctgtaccgttcgaccattttgttgaatttgaaaacctagaaaattatttccttgatacgcaatttctactaatatacgcatgaatttacactcctgaatattttaatacgaataaaataattgcaattgggataatcatggttaaagatatcgtatctctcaattgccatttaagctgtctgtagctcgttctcttaacattggcatcataacccctaacttccattgcgaccgctaattcttcggcgcgttggaaagctgagatgaatagtggcactagtaatggaataaatgatttaatacgtgttgcaatgttccctgaacttatttcagaaccacgcgacttttgcgccaaaatgattttatctaactcatccattaacgtcgggatgaatcgtaacgcaatggacattatcatacttaattgatgaactggtaatttaaacatctttagtggtgcaagtaatctttcaaacgcatctgttaaatcaattggacttgtagatagtgtcataattgttgcaatcattacaatcccaattaaacgcagtgatatatatagcccttctaaaataccattagtttcaatcgtgatgccatgccattcaactaatacatatccacctttagttaaaaatatatgcatcattaatgtgaagattaaaaagaaaaatattggtgttaaacctttgattaggaaccataattgaatttttgctaatctcataatgaataagataagtgcaaacacccaaagatatgttaatggtgaatgacagaaaaatattaatataataaaaagaaaaacaaacattaactttgctcttggatcaagatgatgaacaaaagaattaattggtaaatatcgccctataatcaatttatttttcatgttgccactccttatacaagcttacaaatgcttcttcagttaaggcaatatcttttaattttgtttgatatttttgttcaaagtcatattgtaactgaacaatttctggcaaaccaatatgccaatccgccaatttttttttatctttgaagagctcttttggtgatgtttgcgacactatactaccttctttcataacgatgacttcatctgcataacgcgcgacttcattcatatcatgtgaaattaggataattgccttattttcatctgtttgtagtgactttagtaatctcattacttgtcgtttactttgtggatcaagtcctgctgtaggttcatcaaccacgataatatcaggattcattgccaatatcgatacaatcgctattttacgcatttgtccacctgacatttgaaatggtgattgtgacattacatctcttgaaaagcctaaatccatcaacagacgatgggcatagtttttggcttcatctaaattcattttaaagtttttaggtccaaatatcatttcacgctctactgtgtcctcaaataattgagattcgggaaattgaaataccattccaattctttttcttacaggtctaatatatttatctttggtcttatgtgtaatagtaatgtcatcaactgtaactgtcccagtagtcggctttaacagcgcattaatattttgtatcaacgttgatttaccactacccgtttgtccaacgatggcgtaatatttaccttgttcaaattctgtattaacatcatgaatagcttgatgctgatatggtgtccctttttgataggtataacttacattgtcaaaccgtatagtcatagttgatccaccagcccttcataagttaagaatgatgtttggtgtcccagcatttgatttattttgattgggaatggcaaatctagacctattcttgttaactcttctgcattgtcgaaaatttcagtcgctgtgccttctttatagacagtccctttattcataacgataacatgatctgcttccatcgcctcagataaatcatgcgtaatagaaatgattgtaatattatgttctgatttaacttttctcactaaatccaataaattttgacgtgcatcaggatctaacatagaagtcgcctcatctaatataatgacagaggggttaagtgctaatacacttgctatagccacacgctgcttctgtccccccgataatgcattaggttcataatctgcacgttctaacatatcaacttgtttaagtgcttcgctgactcttctatgcatttcgtcatatggaaccgcatgattttcgagtccaaatgccacatcgtattttacaattgaaccaacaaattgattatccggattctgaaatacaattcctatgtcttttcttaacttttcaaaattatcatcagttatagcttgattattataaaaaatttctccagatttaactttctctatgccaatcattaacttggcaattgtagattttccagaaccgttatgaccaacaatagatgtccactgacctttaggtatattaaaagaaacatctttcaatgtgaaggatgcatcactttgatattgaaatgaaacatttttaaatacaataactgaattcttatcctccacttgtctctctcctttacgattcgtgtatctatcatattttacaatatttataaatcgctgtatatgacattgactgggttctctatatattactagtattttctgactcatttctagtctttaaagtgttgtttaacaactaatgataaggacttttattcctctctaacaattatgtataaacgttaataaaataaatgatttactaatataggggtggtcgcgtttgattcaacgataatactttcacttcattcagttctagtgaaattgatcaaactagcttcatcatatttttagattcgcactcaaaaaagtaaatataaagaaatcggacttaaaaacatttctgttcataagtccgatattttattcaataaaaaagcgcgcaccccatcataagtttgttgagttcacgctttaaatctttatttagttgatggggtactctgagctagacaatatttgtatgtggcaaacattatcgttgcactcatttgctttatataaaagtagttagtgtatttatataaattcttatactaattcgataattactgattcagcaccgtcaccgcgacgagggccttgtttaaggatacgagtgtaaccaccttgacgttctgtgtaacgctctgcgatttcaccaaataatttttgaagtgcagtttgtgtagtttcatcttcgtttaagatttcaacattacgtaaagttttagctgcattacgacgagaagctaaatctccttttttacctaaagtgattaatttctcaacaacactgcgaacttcttttgcacgagcttctgtagtttcaatacgttcactaataataagtgatgtagctaagtcacgtaacatagctttacgttgatcagaagtacgacctaattttctgtaacccatgagttaacctcctttatcaatcttcttttcttaatcctaatcctaaatcttctaatttgtatttaacttcttctaaagatttacgacctaaattacgcactttcatcatgtcagcttcagatttgtcagctaactcttgaacagaattgattcctgcgcgttttaagcagttatatgaacgtacagataagtctaattcttcaatagacatttctaatactttttctttttgatcttcttctttttcaatcatgatttcagcgttttgcgcttcatcagtaagaccaacgaagatattcaagtgttcagtcattatttttgctgctaatgaaactgattcttgtggtgtgattgaaccattagtccaaacatccaatgttaatttatcaaaatcactgctttgacctacacgtgtattttcaacagtatagttcacacgttcaacaggtgaatacaatgaatcaacagggattacaccaattggtaaatcactagtattattttgttctgctaatgcgtaacctctacccttgttagcaactagacgaatttttaagtgaccacctttagatactgttgcaattttaagctctgggtttaaaatttcaacatcactatcatgtgtaatgtcgcttgctgttacttcgccttcatcacgtacatcaatttctaaagttttatcttcttcagagtaaattttcaatgctaattgtttaatgttcataataattgtagaaacatcttcaactacattgtctactgctgagaattcatgtaaaactccctcaatttcaatatacttaacggctgcacctggtaatgaagatagtaggatacgacgtaaggagtttcctagtgtagtaccgtagccacgttctagtggttcaacaacgaacttaccgaatttagcatcttcactaatttcaattgtctcaattctaggtttttcgatttctatcatttaaatatcctccttatatacgtcgacttaatttaaaatgtttgctcagtgacctgtaacaataccatcataaattatacacgacgacgttttggtggacgacaaccgttatgaggtactggagtaacgtctctgatcgcagttacttctaaacctgcagattgtaatgcacgaatagctgattcacgacctggaccaggtcctttaactgttacttcaactgtttttaaaccatgctccatagctgatttagatgcagtttcagaagccatttgtgctgcaaatggtgttgattttttagatcctttgaatcctaatgcaccagctgatgaccatgataaagcattaccgaactcatcagtgatagttacaatagtgttgttgaatgttgaacggatgtgtgctacaccattttcaatattctttttcactctacgtttacgagatacttgtttacgtgccatttaaaatttgcctcctttacctattattttttcttgttagctaccgttttaactggtcctttacgagtacgcgcgttgtttttcgttttttgaccacgaactggtaaaccacgacggtgacggataccacggtatgatgaaatttccattaaacgtttgatatttaagttagtttcacgacgtaagtcaccttcgactttataaccgtctacaacttcacggatgcgacctaattcgtcatcagttaaatctttcacacgagtatcagctgatacgttagcttcttcaagaattttttgagcagttgacgtaccgataccgtatatataagttaatgagataactacgcgtttttcacgtggaatatctactcctgcaatacgtgccatattaatttacacctctcttttattaaccttgtctttgtttgtgttttggattttcacaaattaccattactttacctttacgtttaatgactttacatttttcgcaaataggttttactgatggtcttactttcatttttatacctccctatattatggagtgacgattatttataacgataagtaattcttccgcgtgttaaatcgtacggagacatctcaacagttactttgtcgccaggtagaatacgaatgtaattcattctgattttaccacttacgtgagctaaaatctcatgaccattttctaattctactttaaacattgcgttcggtaaagtatctaatacagtaccttctaattcaattacatcttgtttagccattgattaacttccccctttttgcaatagtaaggtaatcgtcaatagacaactttattgttacgaatctatcagtgattaattttataagttaaacaaaaattacgggaattaattatcgttaattgccactctcatctatctaatatgattaaatcatgcctcacttaaaatagaccgctaaaagttgatctattacaaatgatctaaaatatcaatgacatctttggtaacgtcgctaatatcttttgaaccatcaatatttttcaatacacctttttgatcatagaaatctaaaataggcttagattgtttaatattaacactcaaacgattagctaccgtttcaggattatcatcttctcgttgatacaatttaccaccatcgatatcacaaataccttcgaccttcggaggattaaatacaagatgatacgttgtaccacatgactcacagattcgacgacctgtaagacggttcattaattcttcttccggaacttcgatattgatgacagcatcaatgtttctgtcaagctcagacataatattatttaatgcctcagcttgctcgattgttcttgggaagccatctaataaaaagcctttttttgcatcgtcttcagaaattctttccttaacgatacctacagtcacttcatcaggaactaattcgccacggtccatataagacttagcttctttacctaattcagtttcttcttttatagcttttctgaacatgtcaccagttgaaatgtggggtattgggaatttcttgacaatttcacttgcttgagttcctttacctgcgccaggtaaacccatcaaaatgatattcataagtgccctcctaaaattatctaccaccaaagcctttatattctttttgagatacttgagcttctaaagatttcattgtttcaatcgctacaccaataacgataagtaaacttgtaccaccaatctgaattgattgtggtaatcccataaacttagttgctaatatcggtagaattgaaataacggctaagaagatagaacctacaaaagttaaacgatataaaactttagtaatatattttttggtttgttcaccaggtctaatacctggaacatagctaccttgtttcttaaggttatcagccattttttccggattaacttgtacaaatgcatagaagtatgtgaatagtataattagtacaatatatacaaccataccaacattacttgaaggatttgcagcattcgcaatgttttgtgcccattctttatctggatagaacaacgttaatgttctaggcagtaagaagaacgccattgcaaagattacaggaataacaccggctgagttcacttttaaaggtagataagttgcctgtgaacctaatctttgagcagtttgtttcttagcatattgaatcggaattttacgaacggcttcaagtacataaatagcacctacagttaatagtatcagtgacactaaaagtcctaatactttcaaccatgctaatgatgtatcttcttgcccaacgaacgcagtttgtccaaattgaattagactggctggcaacgttgataaaatacccgcaaatatgataatagaaataccattaccaacaccgaactgagtgatttgatcaccaagccatattaagaaagcagttcctgctgtcaaaactagtgctattaataaataactcataattgactgattgataatcagcgcacctttgagataattattaaattggaatgccatacctatagattggataaatgctaaagaaattgctaaataacgagtaacgttatttaactttcttctacctacttcaccttgttttgcccattctgagaatttagggacaatatccatttgtaataattgcattacgattgatgcagtgatgtagggtacaatacccattgcaaaaatagaaaatcgtttcaaggctccgccaccaaaagtatttaataactcagtggcaccttgagaaccttggggattatcaaaagctgcaggatttactcctggagctggtatataagtccctattttaaaaattactaacattgctagtgtgaagaaaatcttgttacgaacctcttttgttctaaagaagttcacaagggtttgaatcattagatcacctcgtgtgctccacctttagcatcaatagcttctgctgctgaagctgagaatttatgagctttcactgtcaatttcttatcaagtgaaccattacctagtattttgataccagatttttcattcttaacaacaccagattctactaataaagctggagttacttcagtaccatcttcaaatttattaagttggtctaagttaacaatagcatattctttacgatttatgttagtaaaaccacgttttggtaaacgacggaataatggtaattgaccaccttcaaatcctggtcttacaccaccgcctgaacgagctttttgacctttgtgtccgcgaccacttgttttaccgttacctgtcgcaacaccacgtccaacacgattgcgttctttacgtgaaccttctgccggttttaactcatgtaatttcatttcggcacctccttgattatttttcttctactgttactaagtgcttaactttgttgatttgcccacgaatagcagggttatcttcaacaactactgaactgttagtctttttaagacctaaagcttcaacagttttacgttgtgtttcaggacgaccaataacactacgagtgagggtaatttgtaatttagccataactagttttccctccttaattgtataattcttctactgttttgccacgtaatttcgcaacatcttcagcatttttaaggttttgtaaaccatcgattgtagcacgaaccatgttgattggtgtgtttgatcctaatgatttacttaagatatcagtgatacctgctaattcaagtacggcacgaacaggaccaccagcgataactcctgtaccaggtgcagccggtttcataaatacgcttcctgaaccgtaacggccagtaattgtgtgtggagttgtaccttcaacacgtggaacaactactaaatcttttttagctgcttcaacagcttttttgattgcttctggtacctcttgagctttaccagtaccgaaacctacacgaccatttttgtctccaactacaactaatgcagtgaaacggaaacgacgaccaccttttacaacttttgctacacggttgattgtaacaacgcgttcttcaaattctttcgtctcttcttctctacgagccatgtatttgtccctcctttaaattaaaattctaatccgctttctcttgctgcttcagctaatgctttaacacgtccgtgatataaatatcctccacggtcaaatacgatttctttaatgcctttgtcagcagcttttttagcaattgcttcaccgactttagttgctaattcaactttagttgctgtagtagcaatgtcgctgtcttttgaagaagcttgagctaatgttacgcctttattatcatcaataatttgagcgtagatatgcttgtttgaacgatatacgtttaaacgtggcttttcagctgtacctgataagttagtacgaacacgagcatgtctttttaaacgcactttatttttatcaattttactgatcatttcaatactcctttctttagagtttatctattatttaccagttttaccttctttacggcgaacgtattcaccttggtaacgaatacctttacctttgtaaggctctggaggtcttactgaacggatgttagatgctaatgctccaacttgttcttttgaaataccttcaactttaacgactgtgtttttctcaactgagaaagtaatgttttcttcagctttaatttctactgggtgagaataaccaacgttaaggattaagtctttaccttgcatttgagcacggtaacctacaccaacaagttcaagtacttttacgtatccttgagaaacaccttgtaccatattgtttaataaagcacgagttgtaccatggtttgttctatcttctttagaatcagatggtcttacaacttcaattgtgttttcttcttgtttgaatgtcattctttcatttaaagttcttgataattcacctttaggacctttaacagttacatgatttccatcaaaagttactgttacgtcactagggatgtcaataattttcttaccaacacgactcatgttatggcacctccttattttttattaccaaacgtatgcgataatttctccaccaacattacgttttcttgcttctttgtcagtgattacaccttcagaagttgatactaatgcaatacctaaaccatttaatactttaggcatttcgctagcttttgcataaacacgtaaacctggttttgaaatacgttttaatcctgtgataacacgctcatcgttttgaccatattttaagaataaacgaagtacaccttgtttatcatcttctacgtattcaacatttttaatgaaaccttcactctttaagatttcagcaatttcttttttaatatttgatgcaggtaattctaacttctcgtgacgcaccatgtttgcgtttcttacacgagtaagcatatctgcgattggatctgtcattgtcattgattgttgcctcctttcagactcttttttattaccagctagctttacgaacgccagggatttggcctttgtaagctaattcacggaaacaaatacggcataatttaaatttacgatatacagaatgtggacggccacaacgttcacaacgagtgtattcacgaactgcatatttttgttttttttgttgcttagcaaccattgaagttttagccacttaattagcctcctttaaataattatttacggaatggcataccgaagttagctaacaattcacgagcttcttcatcagtgttagcagtcgttacgataacaatatccattcctctaactttacttactttatcatagtcgatttctgggaaaattaattgttctttaacacctaaagtgtagttaccgcgtccgtcaaatgcttttttagaaacaccttggaagtcacgtacacgtggtaatgatactgaaattaatttgtctaagaattcatacattctttcaccgcgaagtgttactttcgcaccgattggcataccttcacgtaaacggaaagtcgcgattgattttttagctttagttactaatggtttttgaccagtgatcaattctaattcttcaacagcattgtctaatactttagaattttgtactgcgtcacctacacccatgttcacaacgattttatctatttttggtacttccattactgaactataattgaattttttcattaagttttcagtaacttcagtgttaaacttttcttttaaacggttcaaagtgggatcctcctttcaacttgttattaattattagatttaatttcttcgccagattttttagcgatacgaacttttttaccatcaacaaatttgtaacctacacgagttggttcgtttgttttagggtccaataattgtacattagaaacatggattgctgcctctgtttctaagattccaccttcaggatttaattgagttggtttttggtgttttttcataatgttaacaccttccacaacgacacggtcttttttaggtagagtagcaattactttaccttctttacctttgtctttacctgcgataactttaacgttgtcaccttttttgatatgcatgtgggcacctccttatttgtattggttgttattaattaaagtacttctggtgctaatgatacgattttcatgaagttaccttcacgtaattcacgagcaacaggtccgaagatacgagtaccacgtgggcctttgtcatcacggatgataacacatgcattttcatcaaatttgatgtatgaaccgtcattacgacgaacacctgacttagtacgtacgattacagctttgacaacgtcaccttttttaacaacgccacctggtgttgcatttttaacagtacatacgataacatcgccgatgtttgctgttttacgaccagatccacctaatactttgattgtaagaacttcacgagcaccagagttgtctgctactttcaagcgtgtttcttgttggatcattagttaaacctcccttatctctaaacttgtattaaataattactgactcttcaacaatctctactaaacgaaaacgttttgttgctgataaaggacgagtttcttgaattttaacaatgtctcctaatttagctgaattgttttcatcatgagttttgtattttttagagtattttactcgtttaccgtataatttgtgtgttttgtaagtttcaacaagtactgtaatagtcttgtccattttgtctgaaacaactttacctacataaactttacgatcgtttctttcgctcacttttgtaacctcctcttacttaattattgattagccttactttgttcaatttctctttcacgagcaacagtttttagacgtgcaatcgtttttcttactgtacgaatacgtgcagtttcttctaattgacctgtagctaactgaaagcgtaggttaaaaagctcttcttttgaagatttgatttgttcttcgatttctgaagtggttaagtctctaatttccttagctttcatttgtttcaccacccaattcctcacgttttacaaacttagtttttactggaagtttgtgacttgctaaacgtagtgcttcacgcgcaacttcttcagaaacgccagcaacttcgaataaaattctacctggtttaacaactgcgatccagccttcaaccgcacctttaccagcacccatacgtacttctaaaggttttttagtatatggtgtatgtgggaagattttaatccaaactttcccgccacgtttcatgtaacgtgtcattgctatacgagcagattcgatttgacgagatgtgatccaagacgttgttgtagcttgtaaaccaaactcaccaaatgttacgtagttaccgcctttagaacgaccagttgttttaggacgatgttgacgacgatattttacacgttttggtagtaacattattattttcctcctccactagtgttcttagtaggaagaacttctccacgataaatccatactttaacgcctaatttaccgtaagtagtgtcagcttcagcgtgtgcataatcgatgtcagcacgtaacgtatgaagtggaacagttccttctgaatattgttcagcacgagcgatgtcagctccgcctaaacgaccagatacttgagttttgatacctttagcaccaagtttcatagctctagtgattgcttgtttttgtacacgacggaatgaagcacggttttctaattgacgtgcgatgttttcagctactaaacgagcgtcaagatcaacttttttgatttcaattacgttgatgtgtacttttttatcagttaacgcatttaatttgttgcgtaatttttcgatttctgaaccgcctttaccaattaccataccaggtttaccagtatgaattgcaatgttgatacggtttgcagcacgttcaatctctacgtgagaaactgatgcttcttttaattcattatcaataaatttacggatttttaaatcttcgtgtaaaagtgaagcgaagtctttttcagcataccatttagcttcccaatcacggataataccaacacgaagtccgattggattaattttttgacccacagtattccctccttaaaagttaattaagcttctttagcttcttctttaccgtcacttacgacgattgtaatgtggcttgtacgtttgttaatcgcacttgcacgaccttgcgcacgtggacggaaacgttttaatgttggtccttcgttagcatatgcttctttaactactaattcatctgtgttcatgtcatagttatgttcagcattagctaaagcggacattaatactttttcaattactggtgatgaagctttgtttgttaattttaaaattgcaatagcttcagcagcatttttacctctgattaagtcaagaactagtcttactttacgaggtgcgattcttattgttctagcaaccgcttttgcttccattaggatgtcctcctctacttaatagatattatcttcttgttttcttgtcgtctgcaacgtgtcctttgaatgtacgagtaggagcaaactcacctaatttatgacctaccatatcttcagttacatatacaggtacgtgtttacgtccgtcgtatactgcaaaagtatgtccgatgaaattagggaaaattgtagaacgacgtgaccatgttttgattacttgtttcttttcgcttccttcttgagcttcaacttttttcattaaatgctcatcgacgaaaggtccttttttaatactacgagccatttgggcgcctcccttcttattatgtgcgtgcagctttaagccgcacacccaaataagttgattatattattttttcttacgtccacgaacgataagtttgtctgatgattttttaccacgacgagttttcttaccaagcgtaggtttaccccatggtgacattggagatggtctaccgataggagcacgaccttcaccaccaccgtgtgggtgatcgttagggttcattacagaaccacgaactgttggacggatacctttccatcttgaacgtccggctttaccaacgttaactaattcgtgttgtaggttaccaacttgaccgattgtagcacggcaagtagataagatcatacgaacttcaccagatcttaatctgattaatacgtatttaccttctttaccaagtacttgagcacttgcaccagctgaacgagcgatttgtccacctttaccaggtttaagctcgatgttgtgtactactgtaccaactggaatgttttgtaatggtaatgcgttaccaactttgatgtcagcttcagcaccactttcaacgatttgacctacttctaatcctttaggagcaatgatatatcgtttttcaccgtctgcatatacaactaaagcgatgtttgctgagcggtttggatcatattgaatagaatcaacttttgcattgataccatctttgttacgtttgaaatcgataacacggtattgacgtttgtgtccaccaccatggtgtcttacagtcaatttaccttggttgttacgtcccgcttttttcggtagcggttttaataatgacttttcaggtgtagttttcgtgatttctgcgaaatctaacgaagtcatattacgacgaccatttgttattggcttatactttttaatagccattgtcgcttacctccttaatggtaattgttttattagttaaataagtcgattgatccttctttaagagttacaatcgcttttcttcttttgtttgtatagccttggtaacggcccatacgttttttcttaggtttgtaattcatgatattaacacttgcaacttttacgttgaagatttcttcaactgccatttttacttgtgttttgttaacacgagtatcaacgtcgaaagtgtatttgtcttcagccattgcttcagaagatttctcagtgattacggggcgcttaagaatatctcttgcttccattatccgagcacctcctcaacttttttagcagcagcttcagtaattactaagctgtcagcattagtgatatctaaaacatttaaaccttgagcagttgtcacttgaacgccagggatgttgcgtgctgataattcaacatttacatcttcgttttcagtaactactaatacttttttaggttgttctaatgtagataatacatttttgaattctttagtttttggagcttcgaagttgaatgcgtcaactacagttaagccattctcttgagctttgaaagataatgctgagcgtaaagctaaacgacgcattttcttaggcattttgtatgcataacttcttggagttggtccgaatacgataccaccgccacgccattgtggagcacggattgtaccttgacgagcacgacctgttcctttttgcttccatggtttacgtccgccaccgcttactgctgaacgattcttaacagcatgcgtaccttgacgtaatgaagcacgttgtaaattaatagcttcgaataaaacgctattatttggctcaataccgaatactgcatcgcttaattcgattgaacctgatttagttccgtctaattttaaaacatcataattagccattatgcatttcctcctttcacttcttattatttattaccttttttaattgaagttctgatttctactaaaccttttttaggtccaggtacgttaccttttactaagataactttgttttctgtgtcaacttgaactacttctaagttttgaacagttacagtgtttccacccatacgtcctggcattttttggcctttaaatactctagaagcatctgaagccatacctacagaacctggtgctctgtggaaatgagaaccgtgtgacataggtccacgagattgtccgtggcgtttaattgcaccttggaaacctttaccttttgatacgcctgttacgtcaataacgtcgccagctacaaaagtatctactgagacttcttgacctacttcgtaagcatccacgtctacattgcggaattcacgaatgaagcgcttaggtgctgcgtcagcttttttagcgtgaccttcagctggtttattagcatatttattagattttgcatcttttttgtatgcttttttgtcttcaaatccaacttggattgcgttgtatccatcaacttctacagttttcttttgtaatacaacattttctttagcttctactactgttacagggattaattcaccgttttctccgaatacttgtgtcatcccaatttttcttcctaagattcctttggtcatcgaaagtccacctcctaaaattgtctattataatttgatttcgatgtctacaccagatggtaagtttaagcccattaaagcgtcaactgtttttggtgttgggtttacaatatcgattaaacgtttgtgtgtacgttgttcgaattgttcacgtgaatctttatacttatgcacggcacggatgattgtgtaaactgatttctcagttggtaacggaattggtccagaaacatctgcaccagaacgtttcgctgtttctacaatcttctctgctgattgatcaattacgcggtgatcataagcttttaatctgattctgattttttgttttgccataattttccctccttattcgtctacatttagtgatagacttctccacgaaaactatcttacacagcgccatggcaaagcggccgggtgtgtcagtaacctttcgcttcatcgcttttcttaaagtccaacgttgggtatattacacgaaaaccatcgataaatcaaggcttttcacataatttttctatctgtctaacacatacttttatattttactttatatacttagtcagttcaactattttcgagatattttttatttccttctttattgtaaattcgtaccttgaatcattttattattatcattaaaaattattctatataattagtcataagaacggtggtgaatgaatatgaaaaatggaccaaaattatctttagcacttataggtatctttttaatactttgtgagtttttctatggcattccttttttaggtgcaacgtttattttaagttttggatggcagcctttactctttaatgcattactttatctaattcttactattatattattagtgaatagacaaaatgcgattagacctatagcgattattccaatatttggtatagtaggtagttttttagctattatccccttcttaggaattttgattcattggattttatttttcctaatgattctatttgtcctagttgtattatcagcgccaacctatatacctaataaaaatgctcgtgtcatttacacacaatacaaagatggacatagagaataattcttaaaacctttttaattaggtatataatatagaagaaacacgtccaacaattttaaaagaagtatatttatatcggatatttaaagacattcataatatcgctttatgttatttcgcttcttattttatccttacttcaaagaaaaaaacgactaccaatcattggcagtcgttttttgtgtctggatttaaccatgaacaaatatgaagtacagaatgaatagtaccattaatacatacattatcggatgtacttctttatgttttttagagataagcattgtaattggatagaaaataaatccacacgcaataccagttgcaattgaatatgataaaggcatcataatgattgtaatgaaggctggcactgcaacttcaaaacttttccagtttatctcagcaaagtttgcagccattaatacacctaccaccactaaggctggtgtcgtaactgcacttgttacaacagcgattaacggactaaagaacagcgctaataggaaacaacaacctgttacgatactagcaaatcctgttctagcacctacagcaacacctgaagttgattcgatataagaagttgttgtagttgttccaaaaactgatcctacaatcgtagctaaagaatctgagaacaatgctctaccagctcttggtaatttattatctttcataatacctgcttgagtagcaacagctactaatgtaccagctgtatcaaagaaatcaataaataagaacgttaaaataacaattaagaactgtatcgttaataattgacttgggtctttaaacgcttcaaatgcagcaccgaacgttggttcaatacttggaatcttacccacaataccagatggcatttgaatcaatccagtgaacataccaacgattgctgtgatgatcataccgataaagatagaacccggcaatttaattgcatataaaataactgtaataacgataccgaatatcgccaaaagtactggtggatcagttaaatgtcccaatgttactaatgtagattcatttttaactataatacccgaactttgtaaacctacaaatgtaatgaataatcctatacctgctgaaacagccatcttcatttgataaggaattgcattaataataacttccctaaaccctgtgacggttaatatcgcaaagaatatacctgagaataaaacgcctgttaaaccaacttgccaaggaatacccatggttaacacaacagtaaatgcaaagaatgcatttaatcccatacctggtgctaacgcaattggatatttagctattagccccatgaatagcgagcctacaaatgctgctaatgcagtcgctacaaaaatggcaccttggtccattttcatatcttctgatacgcctttaacacctgctaaacttaaaacttgcgggttaactgctaaaatataggccatagataagaaagttgtgataccgcctaagatttctcttttaaagtttgttccatatttatcgaactggaaatagtttttcacgaatggatgctcctttttttaaaataccttaatagtttaatatcattcttaataaaaaacaataccaaaagcgaacttttcgtttttctgattcaactttgttcgattttatctataaattcaagttctttaatgcatctttaaacggattattgtctaaaccttcatttttattcatatactttttcatttctttacgagatactttaccagaggatttagacttcatacgctgatccatatgtgcttgcgtttcagaatgtccacaaacacaacgatataccgcttctttccctttaccaaacaacgttaatttctttttacagtttggacatcttgcatttgttttgcgctgtacattctttttcgtcttacaagatggatcttggcacacaagcatctgaccatttttagttttaactttaatcatgaatttaccacacgttgggcattctgtggttgttaaattatcgtgtttatatttacgatcactatttttaatcccatttacaacatctttcgtaaaatctttcatttcattaataaatgttttcgcctgatatttaccacgttcaattaaaagtaatttttcttcccattgtgcagttaaaagtggcgacgttaattcttctggtgctaattctaatatttgtttaccttttgacgttactttaattttaccgtctcttgattcaatggcattcatattaaataatttatcgataatgtcggcccttgttgcaactgtgccgataccacctgtttgttttaaagtttgcgcatattttttatccttcaattgaataaagttctgagggttctccatcgcttttaataacgaaccttcattaaaatattctggaggtgttgtttcatgttctctaatatttgtttttgaaatcttcacttcatcgccttctgaaaaaggctgttgcatctctgtaatagattcaccttgtctaatagatttaaaacctaaaacagttgttacattctctttcaaaacaaatgtgtgccctgcaacctctaaagttacagttatcgcgtcatactcgtgcggaggcattaaagcttctaaaaaacgctcgacaatcatatcgtataactttaattctctattacttaagtctgacatgacaggtctcacttctgtaggaataattgcatggtgatcagatactttttgattattaaatatcgacatttttgatgaaaatgttttagacattaatgggcgtgcttggtctttatatgttgttgccatcgtcacctgaatacgttctttcatagtatctaccatatcagttgttaaatagtttgaatctgttcttggataggttacgactttatgtctctcatataagctttgaagtgtattcaatgtttctttaggtccaattttataacgtctatacatatcttgttgtaaatctgttaaattgtacagtgattgcggatacgacttcttatgtttagtagcaacagatttaatcttaccatcgacatttttcaaattattaaccatctgttctaaagtttctttattggtatatcgctgatttgattctagctgaaaatcaaacccttttaccgttaatgataatgtaaagtattgttgtggtttgaactgattaatctcttgttgtcgtgtatttactaattgaatcgttggtgtctgaacacgtcccagggatagctgtgcatcatactttgttgttagtgcacgcgttgcattaatcccaacaatccaatctgcctcacttctcgctaacgctgcataatacaaatcgttatattgacgaccgtcttttaaatttttaaaaccttgttgaatagcttttttagtaactgagctaatccataatcgacggattggctttttgttaccaactttatccaaaatcaatcttgcaactagttcaccttctcgtccagcatctgttgcaataataatatctttcactttattatctaaaattaacgcttttactgttttaaattgtttgcttgttttaccaataacaacagttttcatatatttaggtataattggaaggtcttctaatcgccattcctttaaatttttatcgtattgttcaggtgtcgcatttgtcactagatgacctaacgcccacgtgacaatatattggttattttcaaagtaaccattacgcttctgatttatttgtaaagcatcagcaatatctcttgcgactgatggtttttcagctaatattaaagatttcataaattatcctttctcatacgttcttttatttcgaacgtgcttcatctattccactaatctttgatttaaattcaatgattgcaaatgatgtgttaaatgtattgtaacatgttaatatcactattaactttcatttcagttgaaatactatataataaaagtaacaaaaagtacggaggtaatgacatgagcatagttcagttatatgatattacacaaataaaatcgttcattgaacattcgaattatgaatcagcatcatacttatataaacttcctcaacagtacaatgaaatagatgtattaataaccgatgcgattgaatcacctggtgtattttcgattaaagaaaacgattcaatcaaagcaatcatattgtcttttgcatacgataaaaataaattcaaagtcataggccctttcgtggctgacaattatgtattatctgtcgatacgtttgaaacgctatttaaagcaatgacttcgaaccaacctgacgatgccgtctttaacttttcttttgaagaaggcattcaacaatacaaaccattaatgaaagttattcaagcaagttataacttcactgactattacatagaagcccgtacaagattagaagaagatatgcaccaaccaaatatcattccttatcacaaagggttttatcgtgctttcagcaaattacacacaactacatttaaatatcaggcacagtcaccacaagatatcattgatagtttagacgaccatcatcatttgtttttatttgttagcgaaggtttacttaaaggttatttataccttgaaattgattcacaacagtcaatcgccgagattaaatacttcagttctcatgtagattaccgtttgaaaggtatcgctttcgagttgcttgcgtatgcattgcaatatgcttttgataattttgatattagaaaagtttattttaaaattcgtaataaaaataataaactcatcgaacgatttaatggtctaggtttccatatcaactatgagtacattaaattcaaattcgaatcacgtaacgtaaaagatcaaacaatccctgaataaaacaccaagcaaataccctacagtacatcattagcatgtattgtgggtttttctactttttgtaaatattgaaaattataagtagttgttttttactattagggcagaatgctttacaataacatgcaagtgtcaattaaggggagcacttgcataaatagtataggagagtgagtagtcttgcaatttcttgatttcttaatcgcacttttacctgctttattctggggaagtgtcgttcttattaatgtgttcgtcggcggtggaccttacaaccaaattcgtggtacgacgctaggcgcactcattgttggattaggtttacttattactggtttcgcaaaattcaataatcctactgtaattattgtcggtcttatttctggtgcattatgggcgtttggacaagcgaatcagcttaaatctattagtttaatcggtgtatcaaatactatgccagtttctacaggtatgcaattagttggtacaacattattcagcgttatctttttaggtgaatggtcttcaatgactcaaattatctttggtttaatcgccatgatattattagttactggtgtagcacttacttcacttaaagctaaaaatgaacgtcaatcagataatcctgaatttaaaaaagcaatgggtattttaattgtatctacagttggatatgtaggtttcgttgtacttggtgacatctttggtgttggtggaactgatgcattgttcttccaatctgtcggtatggcaattggtggctttatcctatccatgaatcataaaacatcacttaaatcaacagcacttaatctattgccaggtgtgatttggggaattggtaacttgttcatgttctattctcaaccaaaagttggtgtagctacaagtttctcattatcacagttacttgttatcgtttcaaccttaggcggtattttcattttaggagaaagaaaagatcgtcgtcagatgacgggtatttgggcaggtattattattatcgtgatagctgctataattctaggtaatttgaaatagaaagttaaatactcatgtaacgtaaaaatgtaatcacttctgaaaataaccattcacttatagaatgattaaaattaattttcgggaattttacgttgaatgttcctctatatgtcctaggaaatacgtggctctaaaaacaaaacgcaataacacatcatgacattaatcatgcgttttaagactttaaaattagcgatacttttaaaatcttgatgatattcatatatcaagtatgcgccatacatatgaagtggatagctgcataacgcactgcattatcaacttgaatgtatgagttgaacaactatgtcataaataaaagcccccttttcacaatatacatttacatattgtggtaaagggggctctcattttctacgaatactaaaatggattttattttcaaatgtgtaaactagacaaacactgcctgatacacgtacaaaataatgatactaataatgattgtcaaattggtcgtcatacctataaatggcagtgttcgatatttaaactgaataccataagaaataattgcaacacctaccgggaacatccaagtgaccaacaatgtcgtcttaatcatatcatctgatactggtaacaacacatatactaacaatcccgcaactaatgctaatccataatgcaaacataaatatttaatagtagcaggtatatactttctttccagagtaaaattcaacatgacacctagcaaaatcattgataacggcatatttgcatgggaaagtatgctaaagaaatcgattgccacatgtggtaaatggatgtgacttatattcaatataaacattacaatgtatgtaacgagtggcactgattgtaataatttcttacctaaatatttaaaatcgaattgatcactaccttcactaaagtagctacctacaaagtaagtaattccaaacatcacaaaggcaccacctatatcagccataacaaaataaataagtcccgttttaggccatatcacttcaattagtggatatgcaaacaatccaatattcatagcaccagtcatcatacctactgatccacgcatgtgattatcatattttctaaaaaaccagacagcaatcattttcgccacaataccatatataatcattaaaattggtaaaatggagaatgacaattttaattctgcactgtttaaattcacaataactaaagatgggagtgtgacattaagaactaatgtagcaatgacttgactatctgttgcttttataaaattaatgcgcttcaaaaagtaaccaagcgcaattaataaaataatcatagtaaattgttctgtcactgttatcccttctttcaataatcttcataatttataactttaacatactccacagatattttagaagtctactgtttcatgctataatctacattaaatgcacttaattatatttcaaaggagtgttatagtatgtctttagaaaaccaactagccgaacttaaatatgattatgttcgtcttcaaggtgacatagaaaaacgggaatctttgaatttagatacttccgcacttgttcgtcaacttaaagatattgaaaatgaaattagaaacgttcgtgctcaaatgcaagattaataatctatcattcaagcaataaatgctttttgttacataaatttgactagcattgctctgaatacgttatattgatgaattgcttcatttttcgctcaattacatctagaatcacaagatgttgtcgtgttatgatttagtgtttcattaacaacatacacgcatatctatcccaacactgctatttatgttttctacgctgctgtactacatgaaccctttgaaacggagaggaagttatcatatgcaattttatctgattttactagcaatactttatctaattgttagttttattagtatttttaaaatggaagttgtatttactcgcattttgagaattattatgggtgtgttgttattattcgtcttagcattaacgacgatgagttttccaaaagagaattggtgggtatttatcgtcttattactcttagtcggtaatgtcgaagtgacaggatttaaaatgcttaaaaaagatctaaaaggcgtaaacatcttgaatttaatgtcattatttatctttgtcatatatttcatcttaaccatcgtattattctaagtaataaacaaaatatgcaataacataattgcaaccttattttattatcggattacatgttgaatgccagtattgttttattaacacatcgattaaatcgcacgtgaaataaggtctaaaatttcaaattttaaaaagccataaaagtagtcaatatcatgaccgcttttatggcttttatattatctatcgtttagtgaatcgtttttttaaagtaaagagaatttcatatattactggtacaactacaagtgttaataaagttgatgaaattaaaccaccaataactgtagcagctaatcctttcgaaataagaatcgagctatcttgaccaaataacaaaggaactaatgcaccaattgttgcaatcgccgtcattaatatcggtctaattctagtaccgcctgcttcgattaatgcttctttcatctccatgccctgttgctcattattaataacacggtctattaacacaatggcatttgttactacgattccaattaacattagcataccaattaaacttggtactgatattgtttctcctgtgattaatagtgcaataattacaccgataactgtaaatggtaaagagaataaaattgtaaatggtgctaggccacctttaaatgtaataactaggattaaatatacgataatgattgcagctaacattgcaaaggctaattgtgtcattgcattgttaatatcatctgatgcaccaccgatattaacctttacattattcggtttatccaaattatttattttagacatcacttgtcgtgttgtgccacccacatctttatttgttactttagcagataccgtcgttgcataatctccttgttcttgcgtcaatttacttggtgtcgttgttttaactaacgtagcgatatctcccaatttaatcgtaccaccagtcggctttttcaaagttatattattcaacttatcttctgaccagtctgtttgcttattttgtttgactttaacatcaacagttttaccattttctttaacagtcgtaactgttttttctggtaagttttcattcaagtgcattgcaagttgacttgcagaaataccattttctgccgctttattttgatcgactttaatttcatactgatcatatgtttgcgataaatcagatttgacattggctagtcctttaacctgtttcattttctgttcaatatcttttacagttgattttatggcatccattgatggaccttttacagtaacctctacagatttattacctgcacctgttcctaaatcttgatttttccactctccaggatgtttaaagccatctgcatgtttaataaccttatccgcttctacatcaaaattaggcgtgtcattatcatattcaaccatgattgccatactatttgtactacccgttggatctactggactactaccgccaactgagtattgaattgtttttacatgctttttctgttttaaatatttttcaacatctttcgcatgattcaacactgcttgctccgtttcaccaggcttcggtgtataagtaatagctaaaaatttatcgtcacctgctgaaataaagctagtgcctagtctcggtcctccaaatacaatagttgcaaccaaaattaatgtacttaatataattacaatccacttatgatttaatgaccaatgtaatacttttttataagttgtactaacaacacctaatccttcttgatgttgtttattacgacgtttaacgccttttttaaatagtgtagctgccaacgctggaacgagtgtaattgacactaataacgatgctaataaactaaatgcaatagccaatgcaaaaggtctaaacatttcgcctactgaacctgatacaaacacaagtggtaagaagacgataatagtaactagtgtcgatgacattattggtttaaatacttcagttgtcgcactgataattaaattttcaccttttagttgttcttctgaatctgttaagcgtcgataaatattttcaacaactacaatcgaatcgtctatcacacgtccaatcgctactgttaatgcacctaacgttagtatattcaatgaaacatcactcaatttcagagcaataagcgccataagaagtgataacggaatcgatataatagaaattgccgtcgtacgaatgtttcttaaaaacagcaaaataactataattgccacgattgtacctaatgatgctttttcaaccatcgtataaagtgatttctcaacaggctttgcagtatccattgtttttgtgacattaaaatctttattttcatcaacgaatgtatcaattttacgttgtacatctttggctacttgaactgtattggcatcttgagctttagttatttgtagattaaccgcatcctttccattcgttttagaaatagaagtacgcacatcaccaactgtaatatcagctaaatctcctagtttcgctgtcggcataccacttatattatttggtgctgacgcttttgaattttgctgtggtgatgcctgattaacgtctgacatggctgaattttgtttattgtcactttgggattgagattgcccttgtcctcctgccaacgttaatggaatatttatgtttttaaaagcatcaacagattgatattgaccatcaacaacaattgatttatctttatcaccaaattggaacaatccaagtggcgttgttcttgttgccgtttttagatagttttctacatcatcagcagtcaacccatatttttcaagttcattttgcttaaatttaagggtgatttcacggttcgtctgcccatttaattgcgcattttgcacaccatctaccgtttgcaattttggtattaattgttcattcagtactttcgttacttttttcaagtcattctctttatttgaaaatgaatatgctaaaaccggaaaagcatccatcgaattacgtcttaattctggttgaccaacttcatctttaaatttaattttatcgatttcttttttaagctgttcttctgctttatccatatctgtattattttcatattcaactgttacaattgaagcattttgtatggattgcgttttaacatttttcacatatgccaatgatcttacttgattgtcaattttactacttatttcatcttgggtactttgtggcgttgcacccggcattgttgttgtaactgaaataactggattttgtacatttggtagtaattctaatttcaatttagcactcgcatatacaccgcccaagacaactaaaacaaccattaaaaagatagcaaacttattccctaaagaaaattgtaatagcttttttatcacagtacttccccctctttcactatattcaaaaatattttactcaaccattctatattgtgtaaaaaaatctgaacgcaaatgacagtcttatgagcgttcagatttcagtcgttaatctattttcgttttaatttacgagatattttaattttagcttttgttaaacgcggtttaacttgctcaattaattggtacaatggctgattcaatacataatcaaattcaccaatcttttcacttaagtatgttccccacacttttttaaatgcccataatccataatgttctgagtctttatctggatcattatctgtaccaccgaaatcgtaagttgttgcaccatgttcacgtgcatacttcatcatcgtatactgcatatgatgatttggtaaaaaatctctaaattcattagaagacgcaccatataagtaatatgattttgagccagcaaacattaatagtgcaccagaaagataaataccttcaggatgttccttttctaaagcttctaggtctcgttttaaatcttcatttttagcaattttattttgcgcatcattaatcatattttgcgcttttttagcttgcttttcagatgttttcatcttctgctgccatttagcaatttcggcatgaagttcattcaattcttgatttactttcgctatattttcttttggatccaactttactaaaaatagttcagcatctccatcttcatgcaacgcatcataaatattttcaaagtaactaatatcacgcgttaagaagccatcgcgttccccagtgattttcattaactcagcaaatgtttttaaaccttctctatcagatcgttctactgtcgtacctcgctttaaagccaagcgcacttttgaacgatttcggcgttcaaaactatttaataactcatcatcatttttatcaattggtgtaatcatagtcatacgtggttggatgtagtcttttgataaaccttctttaaatcctttatgtttaaaaccaagcgctttcaaattttgcaaagcatctgtacctttatcaacttcaacatcaggatcgattttaattgcatacgctttctcagctttagcaatttcttttgcactgtctaacaatgcatttaacgcttctttattactataatcaacaacaaaaccacgcgaaatataacatagcgtataaggtaatttaggtacttttttaaaaagtaactgcgcaacaccctgaacttcaccgtcacgacctacagcgattcttcgcgcgtaccatccagttaatttctttgtttctgcccatttcgttaattgtaataaatctccatttgggtgggatttaacaaatgcgtcatgttcctgattagtgatatgcatcttttccatgatttatgatatctccttctatttaacaatacctttaattatacagtttgtatcttatagtgtcgattcagagcttgtgtaagatttgaactcttatttttgaaatgtccatgctccaattaatagtttagcaagttcaaatttacccattttaattgtgaatcattttatatctatgtttcgtgttaaatttaatgttatcgtacaattaatacttttcaactagttacctatacttcaatatactttcatcatctaacacgatattcatttctaaaatgaaccaacttgacttcaatgaataaatttttcctcaagcaaccacattaatgttcatatacaattacccctgttataatgtcaataatctaacaatgaggtgtttgatatgagaacaattattttaagtctatttataattatgaacatcgttgcaatcattatgacattgagtcaacctctcaccgtgaattactttagtttacgggttatacttatctttttcacatttatattatcaatctttttcattttaattaagtcatcacgattaaataatatattaacgattctttccattgtgcttgtcattattcatatgggcattctcgctcatagcacttacgtatatttatactaatggttcaaagcgataaatagcacctctgataaaaattgaatatggtgaagttgcttgtgcgtcttttatgataaccgaatgatattttgaaactttaccatcttcaattctaaaataaatatcatcattttttaaaatcaaatctgtgtaatggtcattctcttctacaatgtccatatcaaaccatttcaaccaattcgatactgtttgtgatcggtttttacttttcacaataacagtttcaattgaaaattgtttttgaaaatatttttgcaattttttagtacgcatggaatcactttcttcccattgaataaaaaatggtggcttaatttcatcatcatcctgattcattatataaagcaattgccactttaccttaccatctttatgtgtatctctttccatttgaatcggccctactacttcaacctgctcactttgtagtttatttttaactgcctctatatcatttgtacgcaaacaaatatttttaaagccttgctcatacttctcttgaacaatttgagtagcaaaagcgactccgccttctatcgtttttgccatctttttcaacttttcattattttctacatctagtagctcaatataattttcattgatataacctaatttattgaatgttccatatttatgatgatacccacctgaatgtaattttataacatctcctggaaaactaaaccgatctaactgatctatataatgaatgatgtgatcaaatttcaatatcattagtatccccctatttacatgtaattacgcttattttaacaaagtataattatttttgctcttaataattatatattgatttctaattgctcccgttttataattactattgttgtaaaaaggttagctaagctaactattttgtcttaggagatgtcactatgctatcacaagaatttttcaatagttttataacaatatatcgcccctatttaaaattagccgagccgattttagaaaaacacaatatatattatggccaatggttaatcttacgcgatatcgctaaacatcagcccactactctcattgaaatttcacatagacgtgcaattgaaaagcctactgcaagaaaaactttaaaagctctaatagaaaatgaccttataacagtagaaaacagtttagaggataaacgacaaaagtttttaactttaacacctaaagggcatgaattatatgagattgtttgtcttgatgtacaaaagctccaacaagcagtagttgccaaaacaaacatttcgcaagatcaaatgcaagaaaccataaatgtgatgaatcaaattcatgaaatattattaaaggaggcacacaatgactaatcaaggctcattaaataaatcacctattttcaccaaaagttttacaattaactttttagtcaactttatcgtatacctatgcatgtatttgttacttgtagttattgctggctatagtaagcaagctttcgacgcttccgattcattagccggattagttgtaggactatttattgtcgggtctttaattggtcgatttgctacaggtaaatttgtaaatcaaatcggacctaaacgattattatttattggtttaattgctttaattatcacgcaattactttattttattgatggatctttagcttttttaatctttgtacgtctcataaacggtatcgcaactgcagttgtgacaactgcaacaggtactattgcggcatacgttacccctgttaatagaaaaagtgaaggcatcagtttattttccttaagtttagtattaggtacagcgattggcccatttctaggcatgttacttattacaaaatacgcaattgacttactgtttattatttgtgtcatattaggcatactcggactcattatctcattatttataaaagttgatttcgaagtaacaaataacaaaactgaaactaatgtcattgataaaccaagatttagtattcatcaatttattgcaaaagaggccattcctgttgctgtaattatgcttttaattggcgttacctatgcgtccatcctaacttatttacaagcatttgctttagagcgacacctagtcactgcagcaagctatttctttatttgctatgctatagcatcgttaattactagacctattgctggtagattgatggatgataaaaatgaaaatattattgtctacccagcatttatcatgcttttcctttcatttgtatgcttaatttcaagctatcaaagctggttaatattacttgctggtgcttgcctaggtttagggtatggaaatttatcatctgcaatgcaatctattgcgataaaagtctcacccccgattaaatatggtatcgcgacatctactttttacgttggtctagatgcaggtgtcggcttcggtccatcattccttgggttatttactcatatgttttcatatagtgaaatcttcggctttatggccgctttagcaatcattactatgcttgtttacttcttaattcatggacgtcatgtaactagaaatgccatgaactaaatatttatattcaaaaataaaaagcatgccaatctctattcatcatttgtctgtccccaagacgcaattatgatgaatagagattggcatgctttttaagtttttagtttgtaacgcttaacacttctatttctttagtaattttatctaacaatttcttttgagaagtactatagaaatagaatacttgtctttcatccgtttcagaacgcaatttagaaataagctcttttttatagattttacggataatcacatcgattttacttgtatcccatagcatttcaaaatgtaatgtatccctcaattctttaccgctaatcttttcagcttcatacactttaaaaaggactacaaattcttcaattgaaatcttatgtgttgtttttaaccagtgctttaactgacttaactccctttctgcttctataaaacgttgaactttattactcataatatgatgcctcctatgtttcttcttagatgtttgtaattcatattattatacaattacttaaatttattatatatcaaacttagcattttatctattacaaatattaaattgctggctatatcttgtttagatttatatcttttggacaacttgttgtttattcgacaacatttatacctaaaaaagatatattacaactcaatggcatggagtgtgacatcaatgttaaagaaccactaaagatttattatgtagtgattcttaagagtgggatagaaatgatattctcataaaatttatttcgttgatccccaacttgcattgtctgtagaatttcttttgaaattctctatgttggggccccgccaacttgcacattattgtatgctgacttttcgtcaccttctgtgttggggccccgttccccaacttgcattgtctgtagaatttctttttgaaattctctatgttggggccccgccaacttgcacattattgtaagctgactttctgtcagcttctgtgttggggccccgccaacttgtaaaaactttaaaaacgatcatttctattaaatctggcatagatatgaccgtttttactttaataaataatattgtattttagggagtaagacagaaatattaaaacatctctaatgatttaatatgtagtggtccctacacattaaccaccaatataattcatgtttatctttttacgttgacgattggcaactgtttgagcagttctctcatctgaatatcgatcatctcttatttgccataaagctttaaattgttcttttaattcttcgtcggtcacgccagaacgaataaacgctttaacgttaaatccatcgacagttgcaaataaacatccgtaaaacttcccatctgatgacagccttgcgcgtgtacatgtagaacaaaatgattgtgaaacacttgtaatcaaaccaaattgaacaccattatccttatggcgataatattttgctacttccccaaaatattttggttctacaggatcgatttcaaagtgctgctctatcattgtaagcatttcatctttagttacaactttactgaaatcccatccattatcattaccaacatccataaattctataaatcgaatctctatatgtttatctttaaaatattcaagcattggtatgatttgatcatcgttaatacctttttgtataacaacatttacttttacattcaaaccaatagacgtcgcgtaatcaatttgttctaaaatcgtagtcgctttaatattacgattattgattgattgaaatagcgtatcatcaatagcatccaaactgacattaattctgcgcagcccagcatcatataacttttgtccatgcttttttaataacaaaccatttgtagtcaaaccaatatcttcaataccatcgatttgatttaatttagctataagtacatctaaatcccgtcgcatcaatggttctccacctgtaatgcgtattttttttacacctaattctgcatataccttagcgattctagccatttcatcaaacgttaaaagttcatttttaggtaaaaatacgaaatcatctccaaatacctctttaggcatgcaataatcacacctaaagttacaccgatctgtcacagataaccgtaagtcacggatgggacgtcctagtttatcttttatttgttctaccatttgtggacctcctaacagcttacaatttttgaattaaagcgtccaaatcatgctgataatttatatttttgtaccaatatgagggcgcatctacatcccttacatccaaataatccgttgataattcatgatatacatttttaaaactgtaattatcagaatgtagtgctttagttatagcgcctaatgcattcggactataaaatgcaattgttggaataaaacgtccatcttctttaaaagctgcgacatctaaatgattttcaataagatgagaaactaaaaactgatacaacgtgcttacagctttaccagtaatcattggtgtatcaacagaaacgacaaaaaacaattcttcttcaggatgttgcttcatgattgtataaattcctgctaatggacctttatcattatgattctcatcatctataacaacatttggatatttaaattgcgttgccaattgcgcatttgtactaataataatttcattgaacatatttgttgattctaatgtcttaattactctactataaaaggtctcaccgttcacttccgcaaaagctttgggcttaccaaatcgcactgaatgaccacctgcaagaattattgctttcatgctcccttaacctccactaaccggtggaattaatgcaacagtatcattaggttgaatgaaatccgatttttgtacaaattcctcatttacagcaacttgaaactttttattattgatttgcggataacgttcaaacaataaatcttcaaattgttgtacagtcaatgcttgttcaagcacaatatcttcctgtgctttttgtaatatatctttaatttctgcgaagtaaagtaccttcatctctcttattcctccctctttgcttcttcataattccctttttgatgcccttgccattttgaaccatcttcccaaatttcttttttccaaatcggaacaatttcttttatacgctcaattgcatattcatttgctcgataggcatctttacgatgcggtgaagaaaccgcaattaatacagcgatatctgaaatttgtaatggccctattctatgaacaatactcgttatcgttccaggccatttttcatttatttcatctccaatttgtgccaatttcttttcagccattggaatatacgcttcatattctaaatattccgttttgacgcctttagtccattcgcgaacatgaccggtaaaaacaactactgcaccttgatattcatttatagtgaattcacgatattgttctgtttgtatcggttctgtcacgatttcaaattgtttcattcatttcaatcctctatgttaattgtgtatcacaatcatttttaattttatttaataaccattgctcaaatgctgtaaaatcttcatgctcccttacattaatgctataacaaacattcgacaattgttgtaatacttgcaactcttcttcatttcgatagactacgactttttcaaaatcagcatttttaaagccttcaactaatacgatattggtgtcaattgtaacagatttttcaataatttgagtaagattttgattatctacacgtgttacagtttgctgatattgaaaaccttgtacaatactttgatctgcccccgcttcaaaatgcttcatgtgatcgacgtctgaatcctgtaattgaatatcttccttaccatgcccatgatgtttaatagtagcaactgtataaccatgtgactttaagaaagagacaatatgcctcatcaatgttgtcttaccagactttttgtaacctacaatttgtaaaatcataaaagaagttcctcttcagcagcgtcagattcagtcaatataatatctactgtatgccccgctttaaaaccacgtgaccctcctggtaacatgaccatacagttagcatgtgcaatcgctacaaccgcacctgatttattgaatcctgaaggtactacagtagctccagcacttgttaacgttgctttagcacgtataaatcgtgtgaatgggtttgccttggtaaaatcttccattaatgttgctttaattatttgcgggaagacttctagtgcgccacacatatgtttaacagctggtttcacaaatagttcaaatcctgtaaaacaagctgatggatttccagataatccaaacaaatactttccatctacaaatgcaaccgttgttacgctaccaggacgcattgctactttattaaataacacttccgcctttacagccttataaatctcaggtaaatagtcaaaatctccaacagaaactccgcccgttgtaataacgatatcatgtttttccatagcttctttaacgacttggatgccactatctaaatcatctttttgtgttttgtaaataccaacttcaagacctaatttttctgctaaggcacgaatcattgggccattagagttacgaattttcccatcttctaatacatcattaacatctaataattcgcttcctgttgcaataacagcgacactcggttgcttaataactttaacctctgcatagccatatgttgcaaggaccgcgatagcccctggattaattacttgtcctttttttagaacaacatcgcctgtctttgtttcttcaccttttaaagatatattttcattttttgaaaatggtttacgaattgtaaatgtatcttctagttcaatcgtttgttcaaacataacaacagcatctgcgccattaggtatttgtgctccagtcataatacgcaccgcttcgtgatccccaactaatttatcagaaactgaacctgcaccaatatgatcaatcactttaaactcaatgcgattctgaccacttgccccttgtgaatcaacactgcgaattgcaaaaccatcataaggtgatttatcaaaccttggtatatcataagtagctacaatatcttctgctaagatatgatttagacttttttcaagtgctaccgtaattgccggcattgaactctgctgattaacgatacgttgaattgcttctttaactgggattgggtttcttttttctactaccattaaaaatcatctccaaaacttttattttttcatgatatactagatgcactaggaggggtaaaatgactgagtttactcatattaatcaacaaggccacgccaaaatggtcgatgtatcagacaaacaaattacaaaaagaactgctgtcgctcattcaagcattactgtaaatgaaactatttttaagcagatttctaataacaccaataccaaaggcaatgtattgaacactgctcaaatcgctggtattatggctgccaaaaatacatcaacacttattccgatgtgccatccattaccattgactggcatagatgttcacttcagctgggatgaaacaaatgcacccctttatactttaaacattcaaacaactgtctctacaactggcaaaaccggtgttgaaatggaagctttaaccgctgcatcagcaacggctttaaccatttacgacatgacgaaagcagttgataaaggtatgattattggcgaaacctaccttgaaagcaagtctggcggtaaatctggagattttcaacgccaatcaaatcaataaattattttgtaagctcatgaatcagatgatttaattctggtttaatgagcttttctaatgctaatttaactgcgcctgttgatcctggaatcgaaaatatcaatttattattaactgtacctgctacagcacgagacaataatgcacgcgtgccaacatcttcaacataactcaaatatctaaacaattccccaaagccttctatctctttagttaaaagtggttttactgcttcaatcgtcacatcacgttgtgcaatacctgttccaccagtcgtaatgatgacatcaatatcttcttctaaccacttcttcacctgcgtcgtgatggctactttttcatctttcacaattgtataatgtgcgtcactcacttcaacgtcatctgcttgtaatagttggcgcacgcattgaccacctttatctgtatcaaagtctctagtatctgataccgttagtacggctgctttaactgtacgattcaatttaacgttttgatgttcgcccataatattacactccttttgtcttatctttttttatccaaacaataaattcattagatgtgtggcatctgatgtgcgtgtcatgccatgtattaaaaaccttccacctttaaaagcaacaatgcggtgtcctttaaattcaaacataaccatatacgaattactgcgataatttaactgatgttgttttaaaaattgaacaagaatgtcgtgtgtaattgatgcattttcatactgtacagtgtctctaccacacaatgttgcataacgttgttcattcttgtttaaatacggataacttggtacatctccacaagttgtacagtctgaacgttgcattttactgaaaccaaatgaataatgactaccttcccaaatatcgccataagttatttttgtgtcaattggttgttccgttaatactttcatcgcatctcttaattgtaaacttgttgccatcgtcacggcaggttgaatgacccctactgtatcacatgttaaatttaatgctggcaattgtggtaccaaacagttaaagcaaggtgttttaccaggtataaatgcagcttctgtatatgtactctgtacaacaccaccataaatccaaggtatacgatatttatatgcaaaatcattaatcagttgtcgtgtttcaaagttatcggttgcatcaataataacgtcaacgtcctgtccatgtgtttccaaaaaataataatccacatgggcaatataatcatcaatatcaacatcactacgtaacgctagcaaatgctttttagctgcaaccaccttaggcatcattttcaaagcatcttcttcagtaaacaatgtttgtctttgtaaattactaaattcaatataatctctatcaacaatgattagtttggcaatgcctgctctaacaagtccttcggccacatgtgtacctaatgcgcccataccaataatcaacgcacatttttgatttattttgctttgacctatttcacctatttgtttaaataaaatttgccttgaataacgttcttgactcacattaagttatcctttctttttatcattactttcattatatgacgcgcgtcaatgtctctcaaaaaaactgcccctaaaaaagagtttaaaacatcattaaaatgctgatagaagcattcacttctacaattttaaatacgttctaaactctttaatggcaaataaatgattacccaattgtaataatttcatgagccatttgttctgcttcatagtttgaatgtgtcacaaatatgattggtatttgccattcgttgaaaatacgtttaactaatgtaatactctcatcttttgtagtatcatccaaactagaaaaaggttcatctaataaaattaaatctggtttcgtgctaagtgcacgtgcaagtgctacacgttgtgcctctccacctgacaatgtcataggatattgtttcatcaaatgatcaatgtttaaagtttgaattaattgatcgatgtgttcagatggttcagccataaaagtaatatttttatagaccgtcatattaggaaacaattggtagtcttgaaacagatatccaatacgtcgttgttgaattttaacattcacgttttttgccgtatcagtaagtaattgcccattcacttcgataatagcttcatctgctttacgtaatccggcaatcatatttaaaacagtagttttaccaatgccagatggaccacgaactgcataaatttttggttcagtatcatctatattgatgcgaattaaagtgttctttaattgatatttcacattgattttaagcatctagtcgacctccttatatttatctttattcaataaattaattgtagatataaccacaatagagaatgcgactagcactaatacccataaccacgcttcattttctctaccttgttccactaagaagtatatttctaaaggtagtgtattcgttttatttggaatatatcctgcaaccattaatgtagcaccaaactcacctaatgcacgagcaaaactcatcattatacctgctaaaatagagcgtttagctaatggtaaaattaatttgaggaaaattttcgtttcacttgctcccatcgttctagctgtattaatcattttcgtgtctatacctctgaagccttgcacagtatgttgatacattagtggaaaactaacaatgacagatgctatcacagcacctgtcaaagtgaacactacaggtaaatgtagtacattcgcaaagaattgaccgattggtcctcttggcgagaagatgattaatagaataaaacctaataccgttggcggcaaaacaataggtaatatcaataaactttccaatactttaacccacgaacccttacgacgatacaaccatttagatataaaaatacctaaaaccgttacaataatcgtactgattacagcaactcgtattgatatccaaaaaggtgttaagtcaggcatggattacaactccttatgctgcaaagtggtattcttttagtatttctttagctttatctgattttaagaattccatccactcttttgctaatttactatctgatgtagcaccagcttcgtatgtgattggcttcttaagttctacttctttaattacttttacagtatcaatttttttattttgtttatataagtcagttttatacacaaaaccttgtttcgcattacccttttcaacataatttaatacttgttttacatctttagcataaacgattttactttcgacttctttaaataagttattgttatctaaatactgtttcgcatattttcctgctggtacagttttcacttcacctaatgctaatttatcattgtcttttaagtcttttactgaagtgtaatttgaatctttatcaccaattaatactagactatttttcgcatatttatatgtatcatgcgctttattcttgtcttttaatgcatctacatctttagtatttgcagacataaatacgtcaacaggtgcgcctgattcaatttgttttcttaatgcccctgatccaccatagttaaatttaatatcagcatttttatgctcttttttaaattctgaagctaatttcttggttacatctgttaaacttgctgccgctgcaacttgaatctcttgtttcttaccattgtctgcgtcatcttttttactttcattattatcgttagaattagagcaaccagctaatactaaaagcattgcaatcacaacagcaaataaacgtttcaatttcattgagtgaacccccatttttaataatatttacattttcattatacacttactattatatttgaaaagaaccgttgcctgtttatatattgattcaaacaattgtcaaatttgcataagattgatatttattaattgatgccctagtatgtatattctcgaattcaatttaaatcaaacagattgctcgctattaatttttatcaatcaaatttcaaacttaagcaaatatgttaaaattttaagcaaattgctttaaaataaagtttaagctaattaaaggggttagataatgaacaaagatgtatctttaggtcaaccaattgttagatatgaagatggaaaattattcaatacaacagatcaatatgtgacagaatttccacttacaattatggtgaatggtgaagaatttgcgactgttatatgcagtccaacaaaccttgaggagttagtcattggatttctggcttcggaaggtgccattttaaagcgagatgaattaaaatctgtactgattgatgatagtaaaggttttgcccatgttgaacttaataaagatttaggcgatcgctttcaatattccacaaaacgaatgattgcatcttgttgcggaaagagtcgtgagttttattttcaaaatgatgctgctatcgctaaaacatctatgtctaaaatcactttaactccaatgcaaattattaacatgatgactcgattacaaagtgcaagtcatatttaccaagaaacaggtggcttacataatgctgctataagcgatggtttgacattttttgtacatcgacaagacattggtagacataacgctctagataaattatatggattttgtattcagcgacatattactgtccgagataaagtattaatttttagtggacgtatttcatcagaaattttaattaaagccgcaaaaattggtgttggcgtcattttatctaaatcagctccgacaacgcttgctgtaaccttagctaatgacctaaatattacggcagttggatttattcgaaatggtggctttaatatatacagtcatccagaacgtatcattgattctgaacaataacatattcattatagtgtgtcataatgaacgatattctacatgaatcaacaatttaaacgcactatttttataagtataagtagctcaaaacaatttaaaaagcagtaagttgatttctactcgaaaccagcttactgcttttttattctaatacaaacctatcatcaatcgttaatttccaatatcttcttttaatatttgataacaaaacgattgatagacataaccttgctttgcatacatatcttttgctgtatcttcaccatctgcaactaatatgattggtttgtgattttttgatatggcgtattcacctatcaacgattgaattgtagatccaattccttggtgccgaaattgttctaatacaccaaatccatctaattcaatgtaattttcactttcaatgacatctacaacgccaataggttcattatttaaataagctactaagcgtttaatcacatctttttgataatgttcccttaccatttcttcatgtgcatctgcatagtcttttccaaatggcaaactaaactgatatgcaacttttaaataggcatctatatgcgactcgtcaacgatggcaatttcaacgtcagagttacgcggcaaattggcaagcgcatcactttctatggcatacaattccataatacctagttcaaaattcatatctttaaacatagccatccaatgattatcaagttgttcattttccgggaaactaaacgcataatgatttgaaccttgatttgtatgtaattgatgttgacgttctaagtctttcagccatcgctcttgggtaggcgtctttttatatatccatgtgttacttgtgtatcgttgtggaaaagaaggcgttaaataaatcaactgctcgtcgtcattttcaaatatagtgccgttacaatatatatctgacatacttatactagccattgacacctactcctttcacttttataaatttcaaagcaacttattcaattactttactatcttaaatatgattattttattcccataatttgacgaaactgcgagtgattaagtaaagctgtaccaatcaaacttgctacaattgcttttaatatatcaccaggcaaataagctaatgaaattgaaatagctttcgtaaatggtatgttaataatcatgcccataatcaatgtaccaataacatctaatgctataacaccaaaaactaaaataccaacgaataaaatccagaaattaatttcattgatgaatctatctcgaatcgccccaatcatgaatgctacaactggatataatagtaaaaaccctgctgaaggacctgcgaatacaccgatgccaccgcgaccacctgataacaatggcaagccagcaactactaataataaaaagacgataacacttaatgtgccatatttacgtcctaaaatcgcacctgctaagaaaataccaatgttttgaagtacaattggtactgaagaaaatggtagtggaattaccggtaccaatcctaaaatagcgataatcgctgtcattaaagctgtatatactaactgttttgttgtcattttttacttcctttcgtatttcatgaccattattatagcaccattgtaaactttaagaaatgaaaagtttacaataagttgttctatataaattaaaaccttaattattctacacagctgttaatttacttttttagcaagtgcagttatataatcaaaaaatgcgttgttatctacatgatttatgacattaattttgcgcccatctttacactcaaatgtcttaccttgacttggtccataacttattacatcgacttttttctcaattgaatgaaccaagtccttgttaccaatataagcagtcgttaaaacatcccataaaaagtaagtagaatttgttataaagtgtgttaatggtggtaccgctgcataacttactcctaaaaaatcaatgcccgtatattggcgttcattcgcccatctttgtctaacatctaacgttagcggtacttgattcgtactttctaaagcaaccatatcaatctctatatcgctatcaaaaacaattttaaccgcttctggatcccaatatgcattccattctgcagaaccatcatgctcaggttcttcaacatttccttttggtaaaaaggtgccacccatccaaactaatttttctatatactgaacgatagatgaatctttttgtagtgcttttgctaaatctgtaagcgggcctgtaaataataatgttactttttctgattgtctctttaaagtttgaataatgtcttcaaaggcttctttgtcgctcacatttgaagcaacatgtttgactggctcatttaaaattggcaatgcgtccataaaaaaggcatgcatacgccattctttaggaaatggattttttcctcgttcatatgatggcgcaacttgaatatcttcatttgaaaaacgattaataatttttactgatgcgctcaaagatggctctaaataacaatcagcaccaattgtactgacccctatcaattgaacgttttccatttgtaataataaaaatagagatactaaatcatctacaccaccatcgtggttaaaataaactttcttagtcactcgaaatcccccttacatttcattttccattaacaatattatgtttttataaaacgttgttatatatctttctacaaaatcataacattctgttgtaatccttttaaacctcttctttaattgaaagccattccctgatatcccttccataaagtatgcactaaaataattatgatataacttattaataaagagatacattgagctattttctcaggtatactactttagctataataatactaatctatcattaattaaattgaacgataacaacggcacttattatttaaaaaaatacaaatatctaactttctagctataaaaataagagcctaatacaatatcaaaagattgatatgtttcagactctcatttcactaacttatatagctgaattattttgcagctttaattaatttttcttttaaatctttacgcatgaaatctaatgtataaggatcgttgtaccagtatgtaccagcatcaactttaacaatatgtccttctttagtagctttcaaattcttccacatgtttgttgattcgtatcctggtgtaggtttaccttcacttgtactcacaatgtaatcaccagcatatttttcaatttcttcttgtttcacttcagcccaacctgcttttgcagttaacttttgttgttctggttgcattttcaaaccaaatgcttgatataatacttctccaccacgaccccagttatcgccgtaagtgtataattttttatcaaattcatcaaacaatgacactgttgcatcttgtccaattgcttttttaatttctttaccgtctttagcagttgtttcttcccaatctttcttccaagcttttactttatcttctttaccaacaattttccctaacatttcttgttgttctaaatatttatgcttattatagtcaacaactactgttggtgctactttttgatattttttaatatctttgtcagtagagtatacaataattaaatctggcttttctttagcaactttttctacatcgccatcaccaatttttgtaacacctttaaatttatcttttaatactttgctttgatcgacttgttgatttacagctacaatgtttgcacctaattttttaagtccaccagcatatgttggcgcaactactgcaatgcgtttagggtctttcggaatatctaccgttttgccatcgtccattttataagatttagtttcagctttgttatttttttcaccttggttcccacacgcagctaacactaataacataattattaatggtaataatagttttttcataatttcctcctattgaaaatgattatcaatcattcaaaaattatacaagattgcatatacatttacaatagctagtgttatttattttttattttcgcaaaaaatttaacaaaatatcttaacatccctataaatccccacaaaaaaagggtaaatccgaacgtcaaatttcatctctttatgccaatcaacgatcgatttaccttttaaaatttaaaatgtatctgtaatactcttagcaatatttgtatatgctgcatcttccataggtggattgtgtaatcctgcacgcatgtcacgatagtaacgttgtaatggtcgattcatttctaagcttttagcaccaactattctcatcgctaaatcaatcacttcaagcccttgattcattaccatcactttactcgcacttgtgggatttcttatctgactgtcatctttatattgttgatacccttttgcgtgtactcacataaaatattgtactcagcactataacatactagacgtnttcacattttccctaaattttgttgcacagttggcaatgttgcaatcgttccttcaatactattagggctatgttggattgcaaagtttacagcataatttctagcagcttgtgctatacctaaataacagcttggtatatgcaatatccaaccatttggcgctttacttttctctgtttccactaaatgttttaatggtacttttacatcatttaatattaaatcatgactttctgtcgctcgcatacctaatacgtcccaattatcggcaatttcaacaccaggcaaattcctgtctactaagaaaaaaccaacactttctaattcttctatataagcagcaacaataatatgtgttagtgctttactcattgatgtatatgtcttcacaccatttaaaatatacccatcatcagctttaacagcatgtgtacttggtcttccccctcttgttggactacccatttcagcttcactaactgctctattaactaatgcaccattattaatttcaacagcaaattgctccaacatatcttgagaccataatttctgttcataaatttgtcctacgacactcacatgccaaccaatagataatgctgtggcaccatcaagttcgcctaaaaatgattgcaaaataaccatgtcttctatggtcgcaccttcaccaccatatgcttttggtaacgttaattttccataaccttctttaattaaccattcaatatttttatatggaaattggctatgttgatcattatattcagctttagccttaaatgtatctctaattactttgaatttttcaatccattttctttgaatttccgttgttattaaaaaggaattatccatatcattcatattagtcaccccacacaacacacaatataaattatttattcctagtttaacactcgactttaaaaataaaaaggaacgtgctgtgaacaattaaaagaaaactgataattcgattaagtatgcacttaattttatccataaaaatacaccttaaactatacaattcgctgtatagtttaaggtgatattcaaacaatattaggtttgatttaactatcaagcatctactttgtcatgtttaataccagcaaataataaaatccatgtcacgataataaatggcaatgttaatgcaggtaagccaaacggttcaagcaatgttgttgtacctagttgcaccactactgttaataacacacctaaaaaagtcgaaatataagggttaatcgctgttttaaatgtatatcctagtgcgattgccattaatacaaagttataaccgaataatccctgattaatatcatcataattaccacctaatagagctacaatgataaagcttaacaaactagctataacagctaagagtgttgcttttcttgatgctatcaatatgccgattaaaatacatacgccaccaattacactcgcttcgataaatacttgactgaatccttcaaataatgactgaatgaaatgtattctatcattgttgctaaaattaaccgtttcaatgttttgaggcattaactttaacgatgtatctacaaatttaacctgtcctgaaagtaaaattgtaaaccaagtcacaatgacaaaaggcatcgtcagcatcggaactttatatggtcttaaaacttctctcactgcagcagcaactggtaacgttaataaagttgctatcattgttataacaatatctaatcctgacttatctaaaaagattgttaacgcaatggcagttagcactggattaaatccagctaacccatcattaatctctgcctcactataatttataaaacgcgcaaaagtataggcgatgatgctacctacaatagccgctaatccaattgtccaatcggctacaaataatcctattaagataaataatcctgtccatttattactaattaacacaacctgagatatatttttcaaaagcacatctattatcttcaaatctttcacctttcctttgaatcattactcattaatatactactattctatgaaaagttatattaaaaactattttggtttttacataaatatattccactatttgttttcgattagattgtttgcttcaatatcggatatgctaaaaatataattttctaattacacattgaactttgtatattacttgtttatcacaacaattaggattaatataaattttgtaaattgtatctaatatgaaattgggggttttaatttgcattttacacaacgagagcaagacaaattaatgattgtagtggcggcggaagttgcacgtcgtcgtaaagcacgtggtttgaaactaaatcatcctgaggcattagctttaatcagcgatgaattattagaaggtgcacgcgatggtaagaccgttgcagagttaatgagttatggtagacaaattctaaacaaagaagatgtcatggatggtgtcgaacacatgattacagatatcgaaatcgaggctacgttccccgatggtactaagttaatcacagtacatcaccctattgtttaaaggaggcagtcaaatgataccaggagaaattattacaaaaagtacagaggttgaaattaataaccatcatcctgaaacagttatcgaagttgaaaatacaggagatcgaccaattcaagtgggctcacattttcatttttatgaagcaaatgcagcattagatttcgaacgtgaaatggcatatggaaaacatttagatattccagctggagcagctgttcgatttgaacctggggataaaaaagaagttcaattagttgaatatgctggcaaacgtaaaatttttggttttcgtggtatggtcaatggtcctatcgatgagtcacgtgtctatcgcccaactgatgaaaatgatgaatatgcaggtgtattcggagataacggtgctgaaaacgtgaataaaaaaggaggaaaaagatcatgagctttaaaatgacgcaaaatcaatatacgagcttatacggtccaactgttggagattccattcgtttaggtgatacgaatctatttgctcaaatagaaaaagactatgcggtttatggtgaagaagctacttttggtggtggtaaatctattagagacggtatggcgcaaaatcctcgtgtaacacgtgatgacgtgaacgttgcagaccttgtcatttctaatgccgttattatcgattacgataaagtggttaaagctgatataggcattaaaaatggttatattttcgccataggtaatgccggcaacccagatataatggataatgtcgacattattataggttcaacaacagatatcattgccgctgaaggtaaaatcgtcactgctggtggtattgatactcatgttcattttattaatcctgaacaagcagaggtcgcattagaaagtggtattacgactcatattggtggtggtactggtgcttcagaaggttctaaagcaacaactgtaactccaggtccatggcatattcatagaatgttagaagctgccgaaggtttaccgattaatgtcggttttacaggtaaaggacaagcaacaaatccaactgcactcattgaacaaatcaatgccggagcaattggattaaaagtacatgaagactggggtgcaacaccatctgctttgagtcatgcattagatgttgctgatgaatttgatgttcaaattgcattacatgcagatactttaaatgaagcaggatttatggaagacacaatggctgctgttaaagaccgtgtacttcatatgtaccatactgaaggtgctggtggcggtcatgcgcctgatttaattaaatccgctgcattttcaaatattttaccttcatctacaaatccaactttgccttatacacataatactgtagatgaacatttagatatggtaatgattactcaccatttaaatgcggctattcctgaagatatcgcattcgcagattcacgtattcgtaaagaaacgattgcagcagaagatgttctgcaagatatgggtgtattcagtatgattagttccgattcacaagcaatgggccgtgtaggtgaagtaattacacgaacatggcaagtagcacatcgcatgaaagaacaacgtggtcctttagatggtgattttgaacataatgataataatcgcatcaaacgttatatcgctaaatatacaattaacccagcaattacacatggtatttctgaatatgtaggatctatcgagccgggcaaactagctgacattgtcttatgggacccaattttctttggggttaaacctgaattagttgtaaagggcggattaattaactctgccgtaaatggcgatgcaaatggttctatacctacatctgaaccgatgaagtaccgtaaaatgtatggtcaatacggcggaaaccttacaagtacgtcaatgacattcgtgtctaaaactgcttatgaaaatggtatcaatcgtgcattaaatttaaaacgcatggtgcgtccagttaaaaatattagacaattatctaaagcagatatgaaaaataacagtgcaacacctaaattagacgttgatccacaaacatatgaagtatatgtagatggagaaaaaattacaagtaatgcagcaactgagttaccattaactcaaagatacttcttattctaggaggaacatagaatgattgttgaagaaatccaaggcaatattgccaatttgtcaaattcagaaaaacaaaagcacgtcgaaaaagtataccttgaaaattcagatcttgttaaacgtattcaaagagtcgttacagaccatggcactgaaataggcattcgtttaaaacaacctattgacttacaatatggagatattttatacgcagatgaccataatatgattattgtggatgttaattcagaagatcttttagtgattcaaccaagaacattgcaagaaatgggagatatagcccatcaattaggaaatcgtcatttgccagcacaatttacagagactgaaatgctagtacaatatgattatttagttgaagatttattaaaaagtttaggcatcccatatgttcgagaagaccgtaaagttaataaggctttcagacatatagggcattctcatgattgatcatacacacttaagattatttcagttctgtgattcacagtttccaacaggtgctttcagtcattcatttggtcttgaaacatatattcaacgaaatataattcatgacgatcatacttttattgcttggttaaaaatgtttttacaagagcaacttacctattctgatggtttagccatgcgtttagtttatgatgcattggaaaatgatgatacacaaaaagtattacacatagataaactgatgtttgttcaaaacttacctaaagaaacacgtgttggtgcaaaacaaatggggactcgcatggttaaattggctttagaactttataatagcccatggattgcttggtatcatcaacaaatgcaagataagaaagcaaagttaaatccagctatttgttttactatgctaggccatcatttaggtgtagatattgaaacgattattgattactatttatatcaaaatgtttcaagtttaactcaaaatgctgttcgtgctattccacttggacaaactgctggtcaaaagatagttactcacatgattccttatatagaaggaacaagaaagcagattttcgaattaaaagaagcagattttggcatgacagcgcctggtttagaactaaatcaaatggcgcatgagaacgtcaatgttagaattttcatatcataggaggttataattgtggcaaatccgattaaaattggtattggtggtcctgtaggtgcaggtaaaacacaattaattgaaaaagttgtaaaacgtctttcaaaagaaatgagtatcggcgttattacaaatgatatatatacaaaagaagacgaaaagatattagtaaattcaggagttctacctgaaagtcgtatcattggtgttgaaactggtggatgtcctcatactgcgattcgtgaagatgcatctatgaactttgcagcaatagacgaattattagaacgtcatgacgatatagaactaattttcatagaatctggtggcgataacttagcagcaacatttagtccagaacttgttgacttttcaatatatattatcgatgttgctcaaggtgaaaagattccacgtaaaggtggtcaaggtatgattaagtcagatttctttgtaattaacaaaactgatttagctccctatgtaggtgcatcattagaacaaatggctgaagatactaaagtatttcgtggtaaacgtccatttacttttactaacttaaaaaccgacgaaggtttggatgaagttatcgattggattgaacgcgacactttactcaaaggattatcataatggatgaacaacaatggactgggcaacttgatttaacagtgtttttcgatggcaatcgatcagtatcaagagatattttctttgaaaaagcacttaaagtgatacgtccagtttatctaaatcaatctaccattcctacattttatatagtaaatgtaggtggtggctatttagatggagatcgttaccgtatgaatgtgaatgtcgaagataacgctaaagtgacattgacatctcaaggtgcaacaaaaatatacaagacaccttccaatcatgttgagcagtatcaaacttttaatttgaaagataacgcatatttagaatatgtcgctgatccaatcatcgcatatgaaaatgctaaattttatcaacacaatacgttcaatctcaataattctagttcattattttatactgatattttaactcctggttattcaaaaactggcgaagccttcaagtatcaatatatgcatttaataaatgaaatttatattgaagatgagttagtcacatatgataatttattattgaatcctaataaacaatcgatcaatgaaataggttatatggaacattactctcattatggctctgcttacttcatacacgaagatgttaaccaaaaactaatcgattcagtttatgaaaccattagttcttatagcaatacattcgattgtcgtgttgctatttctcaattgcctacacatggttttgcagttagaatttttgcttatcgcacacaaattatagagaaaatacttggaaccatccaaagctatatcgcagaaaatatttatgatcgtaaacttgattttctaagaaaatattaaaataaaaagactagtgtaccttgtttcaagcttaataagctgaaataaggtatggctagtctttaactttaattaaagcatcttcaatatttaaattttaagttaattttatgtcccaatgctgaataaataacttcgttttaataaattgttatcgttcaatgttattaaacgcaattaaccttgatttaatttttaatgtattcttctaattctgaaatcagtttttgaatatttgctttttgtgtatctgtaacataaacaataactgttctttcgtcttgtaaacttcttttctttgataacaattttaaatcttttagcttttgtaaagctttagttaaatagtaaggtttgaactctgagcacttagcaatctctttagatgagatttcgttagactcacttcttaaaatatgatttaaaatataaatttcttcatagttcaaattgaacttcttttttgtatctctgaaaaacttcttaacttgaaatgttgcgttgactaaatcattaatgtcattaattttactcattattaaaccactcctctgatgcacatcttgttgtagcaaggttcacatgtaatttattaaatcgaaactctatccaactatgttataaagttcattctaaacaaataagtataaaaattcaatatttttattactagaatatggttaaatacatttatttcttataataatttgatgtttaagatattttgccaaattgaaaattattagtctgaatattttgtatcttaactgatatgtaaacttttaaaattttaatctatatcaacgtgtttgatttgatattttttatattaattggatggcttgctcacaaaatttataaaatataaaaaaagaagagctttaaatcataacgcatgccatttatctttaaatgcaatgagttatcattcaaactcttcttatcaacctacatacattgacattatactatcatatgttgttttacatattcaacaaacatttcaacgttagcacttttaatatcatgcattgggacattaccaatattaaatttgaacattatagtttgaccatcataatctatcttctctatttcattataactaatacttctataataaaattggccattcatatctacattcataattaatctttcatttgttgctataaatgccccttcaaattcattctcaccttgaacttgatactcaattattcctagcactgacggaccctttttttcagttggaaataaatcatttggattcacattatctaaaatcataatatccctcccacttaaaactataaactattcttcataggtatatgaaatacaagtgattaactatttattattaagcttaacttgtattcccttttcaagataattataacatgcttgaataagcatagtgactttagaaaacttttctcgcttgattgttacaataacacgcctttcatctaattcacatctctcttttttaactaatcccttcaaaattaaacactttaaaatcgggctaaccgcaaatatcgggtgatggaattcaccctgtaattctttaaccgtcaattgacctttatgcagatttaatattcctaaaacgtataactcttctaatgataattgacacatatttaaataacactttagattccgcaataattcttgtgacgacaataaatacgatacatagtcacaactaaaatcaaatgtatattgaccaaaataacgttcaatatagtcactaagctcattattcatatattctattttatctatatgcattttattaatcgaaatagtcaatttacgttgatccctttgatctcttcctttcaatagccattgatgattgtttaaataacttaacatttgaagaagggccatcttagattggatttctttcatttttaataaactatctattgaagcgctattggaatcagaattatcatatttaactaatagatttaatagtttcacttgagtcaaagtgagatgaaatgaatatttcaacatatcattaatgactttcaacattagtatgtgtgcagttaaacgcttaactttaaatttagacatctttaaaacctctcttaaaccatgcctatatctcaagatgatatttcaaatgaacaatactattgcttgagaccattaatgaatgatcataaatatttctttctataaaattagctttccaataactgtgttgttgcataatatcattcacaagtacaccattttcggaagtatgattatctttatctatacttaaaacaatttgtttagttttagcatggctaaattgttgaagacccttacacgataaacgtatagcgtctgaattctcatttaacaatgcggctggcaaacaaatgacacattgtacttcatgtttgaacttcgttacaatcatcgtgtcattttgataaataacaatccctcgtaattgattaagtatatttatgataaaaatgaatattgataatctagttaaatttatttctttgctcgattcacttataattgacatgtgcataataagtcctcgaaattttgtataatttgtcaaaagttcagaaaccttattaatatcagacattgtgattttttcttttaagtcattattctcattaatcaaatctacatcacatataattttagaacgtgcaatagacacctgttctatttgtcttagcggtaagataaaatagtctattagatgatcaatttctttatcatagcgcgtattcaactcttttggttccagatgatatattaattcaaatactcctatataattatctattaaacgtttcagtttttgaattgcagtagtatttaagtcgttaattaaaaatgcaatcttacatctattactctcaaaagtcatattaaaaattgtagctactagcttttctatcttgcctctttcagcactcgttaacaattccttatattcatgtttaatacgaaacactacatttacattgtaattcactatcttttgaagtaataaagtgatttgttcaatcgatagctcattgcttgtgtcgattgtaacaattatatgcaagttttcaggattaacacctaatctttgaatgatttgtttaatagtataataatccatccaataaaaattacttcctttaatataaatgtttttaggttgatacatttgactcctttttgtaggctcaaaaggtatatcaatctcgcgcatacttgaagaactttgattagtatcatcaaataattcaattatatttttatcaatttcaactaattgggaatggttaattgaatgagatgttggactatatctttttctaattaatttaggagtgttaccatacgtttctttaaagaggtgtataaaacgagaataatgattaaaaccatgactacttgcgatttcttcaataggcttcttagaagttaaaatatcaattaagcaatgctccagtctaatatgatttaaatattgaataaaattactataaggtgtcgctttaaacatgtcacttaaagctttgtttgtaatactaacttgattaatgacatctttcctatttatctttttatggtggttgtttgttaaataatcgtgcacttcttcggctactaaatgacgactaccatcgtatgtatttaatgacattaattcaacacacatgtaattaataatcttatcattagcattataagactgttgtttaattttgctgtagattaaatacttaatcaagattctaaaagtgctagcaacctcatttgttaatatcttgccacgcatcatatagtttgcattcataaacttcaaaaatgtctttgcacttacttcaacaacacaacatacactatcatcattaccatcaatttgatacaaatcattcaacataataatggtgacatcatttctttttacatcatattgttgtagattgattgaaactacacctgtaccttgtagccaatatataatttttaagttcgcttccttcacactactcattttcatacttttataaatatgtagtgaataattatctgtcatcttacatcctcacatatacaaatatattgatttactcctgtttgtctttctcaaatcaattgtcaacatctaatattcactaccaattatatcgccacatgttttttagcagtaacaaaacataaatcgattatatcaaataatacttttattaaaacatttttttatgctaaattaggatattttatccattaaatatacattttcatccaaataccaaagctttcataatcatagaaacttgatcgttcgtgtcgaatttttatgcattttctgattaaaagtcctatattatgcacaaaatatacatttagaattttcagtaatattacaaatttgtaacagacttattttcgaaacattcagttttcacaaagaatgccgtagttataagttttgcaaaatgcaaatttctatacttttaaaattctattgtgtcaagatattagcaaaaaattacaaaacgttaacaaagcacacaaggacgctaatttctgttatagtctttcttgtcgtttaattacgagagataacttataacattaattttgtcacacggacattacgaaaatattttagatttaaaatttttaggaggatatttttaaaatgaagaaaatcgctacagctactatcgcaactgcaggattcgctacaatcgcaattgcatcaggaaatcaagctcatgcttctgagcaagataactacggttataatccaaacgacccaacatcatatagctatacttacactattgatgcacaaggtaactaccattacacatggaaaggtaactggcatccaagtcaattaaaccaagataatggctactacagctattactactacaatggttacaataactataacaattacaacaacggttatagctacaataactacagccgttacaacaactactcaaataataatcaatcatataactacaataactataatagttacaacacaaacagctaccgtactggtggtttaggtgcaagctacagcacttcaagcaacaatgttcaagtaactacaactatggctccatcatcaaatggccgttcaatctcaagtggttatacttcaggacgtaacttatacacttctggtcaatgtacatactacgtatttgatcgtgtaggtggtaaaatcggttcaacttggggcaatgcaagtaactgggctaacgcagctgcaagagctggttacacagtgaacaatacaccaaaagctggtgcaattatgcaaacaactcaaggtgcatacggtcacgttgcatacgttgaaagtgttaacagcaatggttcagtaagagtttcagaaatgaactatggttatggcccaggtgttgtaacttcacgtacaatctcagctagccaagctgctggttataacttcattcactaattagtgatggctatgtttacgccaacaaggtttcaagagccttgttggcttttttaatttctatgaaaaaaatcgaattggtaaaaatctcaaaatttcgattttcaccaatccgattcactctgtaataaagaataaacaacatacagccattgacacacccaaatttaggcatgtcaaatcggctatacattgataaatttttagttaaagtacttacaaatatacttgccttcaaattctcaattaatttagtcattacaaatcatgacataaaacttacattacatatatcaacatgttccgctacaaaacatattcagtatatgcatagaggatatttattctaagttaaaaccttttcaaattataaccgctacaattataaatgattaaagtgtttcaacatattatatatattccacgctcacattaagttaaacgtgaattcgatgactttttaatacctatccctgtaaaaccatagataattgctataattgcgcataaataacatggtactgtccatatgaaaaattcttcaacagagacatgaagttgattcgtatagtaaatacctgatgttccccatggtattaaaggtaagaccatcgtacttgagtcttcaagtgttcttgataaaacggaacgagagacttggtatttttcgaacaaatctttcattaacacaccgaccataataattacaatcgaagcaacacctgcagcgaatacaagcgcaatacaacaaataacagtaatacatattaaacttcctacagaatggatgcctttagaaatagtagttaataagacttctaaacatcctgctttttctacaatacctgcaaatgcatatccgcaaaatatcgttactaatatttgggtcatactcatcataccaccctgttctaacaagcttttcacactggatgaaatatgagactgatgtatcattgattcgttaaaaccactaaatgttgctttgaaaccatctgtcattttgaaatgatgattaaaagtccccactataatggcagaaaagcttgatattagcatagctggcactgtagccattttaaatagcaaacaaacaatgatcacaattaagggaacccagacccatatgttaatttgataaatctgtgcaagctctgataacaaagtttgaatctgtttatcatttgaatgccctttaaattgaaatccagcaataaaccatactaataaacctatgattgatgcaggtatcgtcgtccacatcatcgaatgtatatgtttaaatatattaactttagtaacaagcgccgctaaattagttgtatctgataatggtgacattttatcgccaaacacagcccctgctataatagcacccgctgccatccctggaggaatccccaattgattaccaatagaaataagtgcaatccctgcagttgatgcagagccccatgctgtaccagttgctacagatgtaacagcacttataaaaaaggctgatattaaaaaatagcttggattcaataaatctaagccataataaatcaaggctggcactgtgccagaaaacatccaactgcctactataattcctaccgctagtataattaaaattgcaggcattgcagtatttaaacgttctgcaatgcctttttctaaatcttgccatgttaagcctacacgttttgcaatccatgtggcatatgctgaggcaataattaataatacttgaattggaatatcaaaaaacacaaagcctgttacaacaacaataaccattacaatcattgtcgaaattgattctaaaaaggtgggttttcttttcatcatctatcgtccccttcgcttattgatgagaaacctcttttcttcaatttattgcttttgcataatgctatatccttttctatcttcaagccatcatttattttaaatatttttctaaatcaagcttatctaaaccaatttcttcaactgttaagccttcctcaaagaagtctctctctaaaatggttgatgcaattacaattactgcatctatatttggtgtcggtacatcaataacacgacctaagcttgaccatagtactaaaccatatgcaatatcttcagttaaatatctgctttctacatgatttggtcctggaatttgtgaaaatactgggcttgtattaaacaaacgatttaatggttcatcttctttatcacgttctaaataaccacgttcaatacgtgattctttagctgttgataattcaaaacctaatctacggcctaaattcaaacgttctaattcgattgcatgaagtaatctaactgtatgtttagtaattccttctttatataaagcgaactcgccagcataatcaatgcgaccgacattcaataatgttggtcctggatgcacttcaggattaccattttcaagatttgttttaattaagctttcctcttttactaaatgatcataaatacttgaaactttgtcataacaatcatttagacagcttctatcatatgttgaaaagaagatacgacgtacatttagagataaatcaactgctgcattttcaaaatcgacacgcgtaccatacgtcaacgtattagcttccgctagttgtggttttgtttcaatatgtctatcttctaaaacattcataaaacgaattgaccccattgctgcagccatgttgaagaatatcaactgattatcagttacatgctctgccattacatcagcataatactctatgtatgaagatggaataatcacttgaacaatttcagcatcttttaaaacatattccatatcatcactaatatcagtgaattttacgaaacgttcatcaccttcattattaaaatcaaatccgcccttttcgattgcgttttgaaacttacttatagattgattacgacaatataatttaacatcgtggcctttgctcaccatatctactgctgccgtaactgcgccatttcctgatcctacaattgctattttcataaacaaccctctttctatctttggttaaaattaaaaacaaattatacgtaagacaatataaaaatgatgcgaattcattacgcatcattataaatgttaagtatatataaccttaaattaacctatttaaacgccgacgtccaccaattatttttatttttaataattgtttaataaacatgtttatttttgattatattttgttatagttaaagataatattacaattttcaaaggagtgtctaatatgacaactgaaatgaacgacgtaacaaatcatcaaccgaatcgcaaatccaatgatgagaacattatggcgatgcttatctatttattaagtttattcacatctattattggtccactgataatatggttattgaaaaaagatgaatcgaaactagttgatcgtgctggaaaaaattatcttaactatacgatttcttatattatttggtctatcgttttagtcgttatcactttaataggcgttttcctaattgctacagatattgatttcattattattataggtttcatcattacgtttatcggtattttatccatattcgctttctcaatattatcttttgtattcacaattattgcgtgtgtcaaatattataatggccaagaatatataatacctttaacaattcgatttatttaaacatattacaaataaatatttcctattaattatctgttaatctcattgtaactttgactaatttttattacaaaattagtcaaagtttttttattcttttacaaatcaataacattccccacaagaagcattaattttgttaaagtaactattgtcatcaattcgagatgtgagaataaaacagtcgctacgttttatttataaaaaaagatatagaactttggaggactttattcatgaaaaaattagtaacagcaactacgttaacagcaggaatcggcacagcattagtaggtcaagcacatcatgcagatgctgctgaaaattatacaaattacaacaactataactacaacacgactcaaactacaacgactacgacaactacgacaactacatcatcaatttcacattctggtaacttatacactgcaggacaatgtacttggtatgtatatgataaagttggcggagaaatcggttctacttggggaaatgctaataattgggctgctgctgcacaaggtgctggattcacagtaaatcatacaccttctaaaggcgctatcctacaatcttctgaaggaccatttggtcacgttgcatatgtagaaagtgtaaacagtgatggttcagttacaatttcagaaatgaattatagtggcggacctttctcagtaagttctagaactatttctgcaagtgaagcaggtaactacaactacatccatatttaatataaacacgatgatacatattgtcttgaaacttaattctagtacatatgtcatcaaaaaactttgagctttcctttataggagaagctctttttttgctatttttcgttgccacctacttatttatatttcctcccatattcaaaatattaattttttctaatactattaactttaaaactacgttatctaatttaattgatccagtttttccacattacaatattcatagttctacagtgcctaagttatatcgcctccatcaaaagtacgcgcttacatcattgatacacaagacatcatgacatagttgtatactgtctaatcttctactatactaagataaaaggagtgatcttttatggaaaaagtttatgttgctggtgcaataccagaagtaggtttaaaacttttacaagaacattttgaagttgaaatgtatgaaggtaaaggattagtcgataaagacactttaattaaaggtgttaaaaacgcgactgccttaattagtttattatctacaaacgttgataaagatgttatcgatgctggtaaagacttaaaaatcattgccaactatggcgctggttttaataatattgatatcgagtatgcccgagaaaaaagtatagatgttacaaacacacctaaagcatcaacaaacgcgactgctgatttaacaattggattagtacttgcagtagcgcgtcgtattgttgaaggggaccaattatcacgtacaactggatttgatggatgggcacctttatttttcagaggtagagaagtatctgggaaaacaatcggcattatcggtttaggtgaaattggtagtgcagtagctcgtcgtgcaagagcatttgacatggatgtgctatacactggacctaatcgcaaagaagaaaaagaacgagaaatcggtgcaaaatatgtagatttagatacactattaaagaatgcagattttatcactatcaacgctgcttataatcctaaaatgcatcatttaattgatacagaacaatttaaaatgatgaaatctacggcgtatttaatcaatgcctctcgtggtccaatcgtgcacgaacaagcactagtgcaagcattgaaagataatgaaattgaaggtgctgcacttgatgtatatgaatttgaaccagatattaccgatgacttaaaatcacttaataatgtagtattaacaccgcatattggtaatgctacatttgaagcacgtgacatgatgtctaaaattgttgctaatgctgcaattagtgccgttcaaggtgagaaaccacaatttgtcgttaactaataattgaatttattataataacattataaaaacaagaacccccatatgttgagctctcgtttcaacatacgggggttttcatattgttgtattatttttctttcgatttatataagaatttagtttgtccagctgctaatgcatttggcatcattttcataatacgatttctaactgcaacaaataaacgactacgatattgggcaattttaccgatttttctagaacgcttaattacttttgcagtatgtttgacacgtattttatcataacgctgtaatgctttttcaaagtcgtatgcgttaaaacaatttactaatacgatagcatcttccattgcttgtccagcaccttgccccatattaggcgttgtcgcatgtgctgcatctcctagtaaaatagtacgaccataaacaaaagatttgagtggtttcaaatcataaatattatgcaataagatacctgtttcactttgtttgtctaagatctctctaacttcatttggatagtgattaaagtatgcttgcaaatgaggtttaccaaacgaactatatttatgattgttttccttcgagttaattgtaatgaaccaatatgcttgattatttaataacggaacaatacctactcttccttttcttccccagtattcttttgcacaatccggatgctttaaatcaatatcatcaattaaacctctaaagcatgtatacccttgatataatactttactgtcagcatttacagattgtctcactttagaatgaattccatcagcaccaatacataaatcaaatgcttcactttcttgttccgcgaaatgtatggtaactttatctgtctcattatctatatgcgtgacttcatgatttgtaaatattgcgtcatcttttacataagatttaataatgtcaattaatgtttggcgtggtaacgtcacattcaatgtattactttttaatttaacagtagttaacaggcgatctttgtcatctaacactgtcattgtagataagatttgcccagcatttttaatacctttagctaagtcatgattacctagttttttaagcacattatctccgataccaatcccagcgccaatttctttaactgactcatttttttcaaagactttaatagtatgaccttgttcttgtaataatgcagcagctgttaatccaccgatgcctgcacctataattgctatcttcatattgtcacctctatatttttcattcttttctattttatcacatgcactattgtttaaaaatgactcttggaactaacgtttcatttttaaggacttaagtgtattatctgcaccattgtatattacatgcacatttagacagcaatattcatttacatcatgtacatttgtaacaatgatgtgggatatagcatatttgatgctatatagcgttttttgttaggttaaaatccatttaactaacacactcagaatgcgctaaaggagctcgaaacaataaattgttccagctcctttaagcaccgatgtcttatttataatatgtttgtctaatatcatctttctttataccaaactgcttataggatttatccattaatttggcaattttatctgcccagcgaatgtcactcgcatattgatgttgcgcaggattttctggattccatcgcatttgatataaattcagttgattgttttcaaaatattcattacgaatgaactttgcaccaccaataatcgccttatctggtgatgtccattgttccttttcagcataacttttcccactacgaacagcactactatcgaatgctcctataccaaaaaagttgtaatagcgttttttcccatctttaatgccttttgctaattctgatttgccgttacctgtttctactaatgcatggctaacaagataaatgacattaacctcatatttttcttgagcttctagaaaaactttccctcgattttctaaaatccccttaccttttagcaattggttaacttcagattccgacattggcactttttctgtgatatccatatacttcatatcattgtctttatgtgaaatagtcattgctttagcaatttcattattatttgcttcaacaaatttaccatcctcttcttttgtctgtacaatacctttcccttgttgcattgaaacagcctcatcaaaagagtaattcacatcatttttaaacaatttagtttcattcacgatgagtaatacagcaaaaacaactaaaataactatcaatagtagcgttgaaatgcgtaacttgaaattcttcttcatatagacaaaacctcatttttcttacttagacaataaaaaatatgccactacaatcgctaatattacgattaaaaaagaagcgttaacgattactttcatcgttgttctatctctgaacatcatattaaagacaactagactaattgataatgaaacagcaaaaaaagtaatagctaacactaatttcatcataaatagacagactaaacctatgactaataatgtattagaaattacagctgacgtttttaacattctcgaattaatatgcactcaccctttttatttaaataacttacataatcataataatacatgatgtttcataggcctgtcgatgattgattcacaatagcacgtgatttttttgtttttcaatattattcatttattccatcaaaaacaccctttttaatttttacaaaaattaaaaaaagtgctcctacactgcttgcatgtagaaacactttttcattgtaatgttattcttctcgagacataccttttagcatattaagcatgtatgttaaactacggttcatgtcgtcatctttcaatacgcccaatagacttcttatagttgtcttagcatttggactcgcttgattggcaacgtgtaatcctttattaactttatttaggaagtcgcttaaatctgatacattgagttcacctaataaaaataccattgaagccatattagataatagccctgtataaatatctttattaagttcaactgcaaatttatttatgatgacttgacgtcctcgaattgcaccatttaaagcatctaatagttttgcatcatctaatgttttaataagcttgattgcttttaatatactatctttattcgctgcaattgcctctgtaacttcatttaaactttctaacttaatttgttcttctgatttttctaagcgtctaattttagaagatattctctcagccattatttatccacctgatttcccgggaaaacataatctgaacgttcccattttttctgtacttgaacactgtactgcggttgacgttttttattgacacggaaattattagggttcaacggtgacttaccacgtttcgtaattacctccaaacgacagctagtacgtttataagatggtgtatccgtgtattgatcaacatcactattagttaataagttaattgcacctagatctccattttccatcgcatcattatttaatggaatatagatttctttacctttaacacgatctgtcacgtgaacttgtaataccgcttctcctgtttcagaaatcagcttaacttctgcaccttcatgaatgcctctatcttcagcaagctctggagaaatttcaacaaatgcacgtggcactttgtatttaatcattggtgtttgataagtcatattaccttcatggaagtgctctaacaatcgaccattgtttacatgaatatcataaatttcatcttgcttaaagtaattatcaaatgataatgggaataattttgctttaccattatcaaaattgaatccttctaagtatagaataggctcatcagtaccatcaggttgtactggccattgtaaactattgaatccttctaaacgatcataacttaccccagcatatagaggtgttaagcgtgctacttcatccataatttcactaggatgcttgtaattccaatcaaatcctaatctattagcaattgcttggaaaattttccagtcaggttttgaatcaccaagaggttctaatgcttggtataaacgttgaatacgacgttcggtatttgtaaaagtaccgtctttttcaagtgaaggacttgctggcaatacaacatctgcgtatgttgctgtgaatgttaaaaattcatcttggactaccatgaaatctaatttttcaaacgcagcttgtacaaaattaatatttgaatccacaatacccgtatcttcaccatataagtacaatgagtgtacttctccgtcatgtataccttctaccatttcatgattatctttaccagcttttggattcaatttaacgccatattctttttcaaatttagcgcgaatatcatccgcttcaatactttgataaccagtaatcttatcaggcatacttcccatatcactacatccttgaacattattatgtccacgtaatggatacgcaccagtaccaggacgacgataattacctgttactaataataagtttgaaatcgctgtacttgagtcactaccaatgtcttgttgtgtaatacccattgcccaacaaattacaacagattcagctttagcacattcttcagcaaatttaatcaattctgattcaggaatacctgttgcttcttcagcaaaagccattgtaaatgtttctaatgatttgtaatattcatcaaaatcatctacccactcatcaataaatgctttatcgtgtaaatcatgatcaataatatacttagtcactgcacttaaccacgctaaatccgtacctggtttaggttgataaaaacgatccgcacgttctgccatttcatgttttctaatatcaaatacatgtattttttgaccaaataatttttgtgcacgtttcatgcgtgatgcgataactggatgagcttcggctgtattagtacctatcaatacagacattgccgctttttctaaatcttcaatactacctgagtcaccgccgtgtccaaccgttctaaataagccttttgttgcaggtgcttggcaatatcttgaacagttatcaacgttatttgtgccaataacttgtcttgctaatttttgcattaaatacgattcttcattcgtcgctttagaagaagaaatgaatgatagtgcatctgggccatgcttttctttaatagctgtaaaattatctgcaatgacgtttaaagcttcatcccattctacttcatggaactcaccatttttccttactagtggtttagttaatcgttgatctgaattaatatgtccccatgaaaacttacctttaacacaagtcgcaattttatttgctggagaatcatgtgatggttgtacttttaaaatttctctatctttagtccaaacttcaaatgaacaacccacaccacaataagtacacactgttttagttttcttaatacgctctttacgcatttctgcttctgaatctgagattgcaaatagtggaccataaccaggttctgcttttttagttaaatcaatcattgctgctaatgaaccaggttccgtatcagtcatataacccgcattaccttccatattcacttccatcatggcattacatggacataccgtcgcacattgaccacaagatacacatgaagactcattaatcggtacatcattatcccaaataacacgtggatgttcacgatcccaatcaattctaatagtttcattcacttcgatatcttgacatgcttctacacaacgcccacataagatacattgatttggatcataacgataaaatgggccgtaatctttttcgtatggcttctctttatattcatacgtttgatgctgaagcccccatgcatccatcgtattatgaatttcacaatcaccattattataatcacatactgtacaatacagcatatgcttttctaaaattcgatcaagcgcttctttttgagcatctttcacatcattgttcacagtatttacagtcattggacgatcaatcaccgtactacatgaacgttcaattttaccgtcaatctcaacagtacatgtatcacatgtttgaattggtcccatcgactcgttataacaaattgaaggtacaaaagtatcttgtgatttaataaattcaagtaaattcgtacctggttctacaagataatcttttccatcaagtgtaaccaccaaatgttcttgcatattactcaccccgtctatatatattttccgtaaatgacttttaataaattgctcatatccacctaaaataacgatgccccacacatctttcagatagaattaatttaattgtattactttatgtactagttgttaagtaaaattttgtattttgcctttttacaatcatttttatttgaaatattttgcgcgaaattaaatcatctttttgtttaattgaaaataattatcattattagttttccaattatctgtttcacgctttttgccatatctttcacaaccttattaatgacaatatttaataatcacctcacctaaaaatcgttatactatttataaataccctttttctgaaaattaataacccaagtttgataaatatctactatcatttagaaggtaatatttatctttaaattaaatttgtaatggattaatttataaaaatcaaatcaggcattaaataaaatagcccataaatacaaagtgttatcaccttctatttacgggctattagttctattcgttattctatttacagatcattctatctaattaatttgtgtacaattttgataacttattttcccttagtttactactctagattatcttttaataacttagtactttcagcttttgactgctcactaggaatgaagtagtacaatccgtcactttgaatgccgccttgaccactcaattgatgtttattaatcgtgtcattagcatctttataattgcttctaatcgtattcaaatcacctaatgttaaatctgttttaacattattttgaatttcattcattagactattaaaatgtgtaatcgatgatgggcttgcaatcttattggccatcgcttcaagcacaatttgctgacgttgttgtcgaccaaagtcaccaccagcaccttcttctttacgacttctaataaacttcaatgcttgatcaccatttacatgtgtctgctgtccttttgtaaaacgaacaccatcaacagtgaatgtatcattacttactacatcaacaccgccgatgctatctatcatattatgcaaaccatccatatcgattgtcgcataatgatcaattggcacattcattaatttttcaagtgatttaacagccatatttggtccaccatatgcataggcatgtgcaattttttcagtagtaccacggccaacaatttccgctcttgtatcacgcggtatacttactatttcagttttcttcgttttagggttgatagataaaatcataatactatcactacgctctccgccaccctttttcttacgatcagcatctgaatcgacaccaaataaagcgattgtgaatggatcaccatcgtttaaactcacttttttatctcttaattctgaatgattgcgatctaacggattgtgtatcttattaccagtaataaaaattttagcagctacatacacaacagctacaatcgctaagattactaaaataccgaatacccataaaaatatttttttcggtaggctcattttacttttagacgaacgtttcaatcccaccactcctttactattccttacatactttgtctgttttctctatttattatatagtaaaataatttttttactatacttctgtagacgtataactattttttatcattttttatctctagagaatatctatctgtatttttgataaccaccatttgcatttaaaattttaagtaccgtttcatgacatgctttattacttataataaaaggtgcaccctttaaatgatcaattgccttaccatctaaagtcgtcatttttagattcaatagttctgcaaataaaaactgtgcagcaatgtcccaaggtttaggatttgtattaatatgtgccccaaattgaccttttgccactcgcatagaatctaatccgcaagcaccaactaaacgataactaaatgaggcgtcaaataaatcttgcaccgtatctagattcatcacttgtgcattaaacgatataatagcgtcttccaattttaacgatggtggttcttccatcttaattccattacaaaaagcaccttctcctcgtattgctttataaagctttttatgcggataatcatatacgtacgataacattggtttaccttcataaaaatacgccaatataatacaataatcttcttgctgttttactaaattggcagttccatcaatgggatccataatccataaatgattaatttcattcgtaatcatttcattacttttttcttccgctaatagttggtgttccggaaaatgtgttgctaaaaattgttggaattgttgttgaatctgtttatctacatttgtaactaaatcaaatcgatgacgcttagtttctgtagtcatttccataattaattgcggaataacattgtctatttgtttcaaccacgaacatattaacttatctatttgctgtaatgttttatctgtcatttcgtccaccacttctcatatcattatcattttattattaccctatattaaaagaatcaacaatacaactgaagacttcttcattttatgcataaaaaaatcggctagtcacgtgctagccgacaaatagaaaggaaagtaagtaataaatattgaagatgttgtgatgtaacttgaacgattaaaagctatctgttatatagctctacccctttgtttaatcgctccccctgttacaagtaatatcatagcacaatcttttttaaaatgtaagcgttttccacaaaatttttacgatttttttaaaaagatattgaaaatgtcctcattgtcactcttatgttatactttgtgtaatatatcatcttttaggaggtggctgtcatgaataaagctgaaaggcaaaatttaataattactgcaattcaacaaaataaaaaaatgaccgctttagaattagctaaatattgcaacgtatccaaacgcacaattttaagagatattgatgatttagaaaatcaaggtgttaaaatttatgcgcattatgggaaaaatggtggttaccaaatacaacaagcacaatctaaaattgcattaaacttatctgaaacacaattatcagccttatttttagtgcttaatgaaagtcagtcgtactcgacattaccatataaaagcgaaatcaacgcaattataaaacaatgtttaagtcttccacaaacacgcttaagaaaattgcttaaacgcatggacttttatattaaatttgatgacacacaacatatgacactcccaatgctgttttccgacattttaatttattgtacagaacgaaatgtgatgttagtagatcatagggttgatgataatattaaagctgaaaacgttatatttattggccttttgtgtaaacatggacattggcatgcagtcatttatgacattgctcaagacaaaactgccgaactcgaaattgaaaatattatagatatttcgtattcattcggtaagacgattcaaaccagagacatatccattgataactatcatcaatttttaaaccccatcgattcctaaaaaacagcagtaagatgattttcaattagaaaatatcttgctgctgttctctatttatacaatacttcgtattgaatggcttcgctttcctagggtgccgtctcagccttggtcttcgactggcactgctccctcaggagtctcgccattaatactacgtattaacatgtaattttactttgaaatacttaaaaaaataaaacactttgcccaacttacactaccaatagaaactgctgttagaattcctcaaaatgatatttcgcgatatgttaatgaaattgttaaaaagatagctgatagcgaattcgatgaattcagacatcatcgtggcgcaacatcctatcatctaaaaatgatgttaaaaatcacctcatattcatatactcaatctgaattttctggccgtagaatagaaaaattacttcataacagtattcgaatgatgtggttagctcaagatcaaacaccttcttataaaactattaatctttttagagtgaatcctaatactgatgcgctaattgaatctttatttattcagtttcataataaaatgcatatcaaaaaagctgatttctatcaaataattaatagaaatcagcttttttcattgcctaaaaacttaatgtcccgacctctttatctacgcataaatacttattactgatataacgaaagaaacaaaattatttgctatatgtaatgcaattgttgaacctaggtttcttccagattttaaataagtgaaaactaatatgatggatagtatgagatatggaccaaactcaaacggcgactttgcatcagtcacatgaataaatgcaaataagaacaccgaaacaatactcatagctataaaattaaacttcttacctaattctccaattaaaatatgtctaaatacgatttcttcaactattggacctacaatcacaattaataagaatgctacaggtaaaaatgcaggcacttcaaacattttatttagctcaagttcattggctgtttcactatattgcaaatgtttaggtagaaactgtgtcatatattcatatgtataaattaagatgagagcaataatatacgttattgacaatctaagccaatattttttgatatacgcaaaaccagctcgaagccttgatggcatcacttttaaatgaaataaataaaatgcgccaatcccaatcgtatatgctaaagcttgtgtgatagtcgctacaaatatcagattactatcgatttcataataaccaaacaaaattggtcctatgtaagctgcaattgtgagtgcataaaatataacacctataattggaattataagcaaatctctccatgctatatctttaaacgtgtatttctttttttcattttccactgttatatcctttcctgtttaataattgatttttggaggtacttctacatgataaacgaaactaagtatatgagacaacaaattactaatttgattcaaatcattgatacgattaaatataatactttaatgacagattggaacattcaaacgcatatttataaatttaaccaaatagttactaatgaattgaataagttcaaaggctttgaaacatcatatataataaacgaaaatcaagtttcctattatgaaattataacactacttaataaacgtcccctccgacaagtcgactatggtaacaaaattcaatatcttaatttttatcatacagaactatctaacgcattatttgcaattaaatttgcccattaacctatttttcataaaatgtcatttaaacaagttatttattaaaattcactttattacataaattatacaattaaaaagtttcttcaaattgtaaagatgcattaatcgagttataatcataatgattaagatggtagatttagtcttatataactacatttactaagatttaaatagatgagtacataatgtataaattgggaatatacagtatgacttacggtaatatatcaatatattgatatattatttgcacatgggagtatgctattttttatctatacatcttaaaaaaatttacagttttacaattcaatatcattaaacaaacaacatattcagcttatttttcattctcttacgttacaagttgtaaataccatcgcgttaaacaacaatagccaacgctaataaaatatattgcgttaaagtggagtgattaatatgtcaaacgtactaacagaaatagatagtcaatatccatatatgactaaaaatgaaaaaaagatagctaaatttatactaaattcacctcaaaaggtgattaaaatgaggtctcaagacttagcaagcttattagatattagtacatcatcagtcattcgattcagcaagaaaattactgatggcggttttcacgacttgaaaataaatatatctaaatatgttcctaaagcatcatcaatttacaatgttgaattaatgaataacgaaagcacagaatctttaagaactaaactccatacacgtactacacgcgcacttaatcatgcaaataacgaattaaatgataaaactattgatcaaatatgtcattgtttaaaacgttctgagacgatttttatatatggttttggcgcatcttttgtagttgctaccgacttataccaaaagttatcaagaataggtcttaatattcaacttgttcaagaaacacatatttttgctacattattagcaactcacaattcgaacgacagtgttattcttattactaacaatggtacgcaaagtgaaatgcaatcaatggttaaagttattgatgactaccatatacctataattacaattactagtacaagggataatcccgtagcacaggcatcaaatattgttttaacttatgggaaaactgatgaaaatgagatgcatatgggagcaacaacttcattatttgctcaaatgttcactattgatattttatattatcgttatgttgcattaaattatcacgcatcattagatttcataacacaatctaaaatggctttagataactatcgtaaacatttatcaaatattaactttaaacattaacagtcttatataaattctttaatcatgtcatataataatttatgcatcattttcaaagcttacatgtcttttatcttgtataacatacgcatatgaccaatgatttgataaggccattcaatttcttatattaaaaacaaacgcagttgattaacggattcattccatatatcaattgcgtttgttattttaataatgctattttttattttaaagcccacagtaaaaactaacgataatattgccacttataagtttttcacactacaacttcgatttaagctatatttataaaaaaatgcgcctactcataacattctttggctatttaactttaataagctagggccaagtttgtcataagataagcgcacattataatcatactattttgcttttacattatttttattatatctaataaaataataaatcgttacaatcgttaagaagatgacaccaataagcactgatattctagtttcaacattaaataccataccaaccaatactaatattaagaataagattgttaaatagttagttactgcgccaccaggcattttgaatgggtgaccttccaattcttcagggtgtaattttctaaaacgtaaatgactgaataaaatcataaaccaaggaatcatacctggtaaaatagacgcactataaacgtatacgaaaatactcttcgctccatcgatatataaaggtaaaattacgtttaataaagcaccaattaaaataccaagagatactgctacaacagtgtacaatggtacaccatttctcatgattttagtaaatattttcggcatttcacctttatgagcaagtgtataaatcatacgactcgcactgaaaatacctgagttacatcctgacattgctgcagttaatacaacaaagttaattaatccagctgcaaatgtaataccgattttagcaaatgttgcaacaaacggacttccaatgtctcctaattgattccaaggatacactgaaacaataacaaaaatagcgcctaaatagaaaattaaaattctccagataacaccattcactgctttaacgatatttttctgaggatctttagtttcacctgccgtaatacctatcagttccacaccttggtatgaaccaattacaattgataatgcaaagaagaaaccaacaataccatttggcataaatccgccatttgtccatagattagaaatacctaccgcatggccaccatttccaaaaccaaagaaaataagaccaaaaccagcaataatcattaaaataattgttacaactttaattaaagcaaaccaaaattcaaattctccaaacgcttttaccgagaataaattcgctgccattaataataaaatagcaataacaccaggaatccaagttggcaattccgggaaccaaaacttcatatattctcctactgcgatgacctcactcataccaactacaatccattggaatatattactccatgctgtcatataacctgctgcaggatgtatataatcacttgcaaatgttgcaaatgatcctgttgtagggtttaaataaatcatttcccccattgctctcatgattaaaaataaaaagatacccgcaattaaatatgcaaggataactgatgggcctgtccatttaattgtacttgtcgcacccatgaaaagccccacgccaatcgtaccaccaagtgcaatcatttgaatttgacgggcactcaatcccctttgtagttcattgttctccataacttcttaccccatctctgattgatactaaataaatccataaaaaaacttattgccgtaattatactataaattatcgattttggtacattaatatttgcataccatgcaatcgtttacagaactactatagcaggcttttgcaactttgcaaacaattattttgtgatttttctaaaaaattaaaaaagttgctcaagtaccgttgagtcacatacaacttcagctattcttggtaattatgatataattttaataatattaaaaaggagtatatcaatgttaaaacaaatactgctacgtgctacaaaaatatcggtactctttgctgtagcatttttcatcataaattatatcggtatggaaaaacctgacatcctatatttagttggaagaactattattgcaacacttgctttcatactcatttgtcttacagtatttactattattaattctccagagcgcaagattaaactcgggacgactttaccgattgcattaattattgggatcattttcggcgccatatttttaacggtacaaatcggtgtcatcactgggttaatcatcggtgtgattgctacgtttatttgggaattgattgaaaaaaataaaggaggtcgttcatcatgacaacagcattaattggtgtaattgtattaatcttactaattattagctttgtgccaaactaccgtgctatgaaatcagcaaaagaacaaggaagtaatgcaacaagagctacaattatggtaggcatagatattatcttaattgtacttatcatcgtgacgttattattaaaatatatgtaactatttaaaccaccctatctcatacataaacatgaacgttctaccatttcacatacatatggtcgtccatttaatgaggtaaggtggttttctcgttaaagtttaccttgtaatagtaaaaaatagccaattgttgcgagtattaagtaaatcattgaaccaacaacaaaagatcttacttgcacgcgaaatggtgtctgtttgttaaatataggaccaatcaccaaatttccaacgcctaaaattactggaccagctagaaaaaacaatataatgtaacccatcatgatacgcctcctatttcgtaaagaaacgcgctacaatttgatcgtaatcaatatcttttgctacataatctacattagaaaagtcctgtgcgcttgtcattttattcgtattaacaataacatctaatccagctgcaatcgcggctgttgcaccatttacagaatcttcaatagccaaacattgtgtcggcatataatttaattgttgtactgcagataaatataattcagggtcaggtttaacttgttcaacatcttctctaccaacaactacctctatataatcgtctagacctaatgctttaaaggtgggcattatttccgctttcacactacttgtggcaattgccataggaatgtgacgttgctttaaaaatgccatcaatgatttaatcgtatcaatcatcggtaatgttgtactagtaagatgatgttcttcataaagtttatctttattttccgaaccaatcgctttaattaaatggtcatgcaaatctgtagctgctcctccaatagaagaacgataaaaatcaatgcttataggatcggcattatgcatctctaaatgtttattaataacattaaataaatgttgttccgtatctattattgttccatcgaaatcaaatataactgctctatacatatatttactcctctattttttctctttatcaaagcttaacatagtccgatgaccacttcattctattagtgcaattataacttttttgaccaatactttgctaaaataggccctgttatattatgaatgaaactaaacactgcgcctggtactgctgcaattggattaaaatgcaatgctgctaatgacacagctaaaccagagttctgcattccaacttcaatactgactgctttttgatcttgtcgatctaattttaaaagacgagctaaccaatatccaatcgtataccctaatacgttatgtaaaataactactaaaaatattaataatcctgtagttaagatttggtgcttactgccacctacaactattgctaaaattaatgaaatagcaacaactgatataattggcaaagctgtagaagctttttcagcaattttacgattaataatttgcaaaacaatacctaaagcaattggaattaatacaacttgaacaactgaccacaacatactcacgaaagatacttccaaccattcatttgcaaatagatatattaacgcaggtgtaacgaatggcgctagcaacgtagagaccgtcgtaatagaaacagaaagtgctacgttagctttggctaaataactcattacattacttgatgtcccacccggacaacatccaactaatattacgccaacagcaatatcaggtggtaaatgaaaagactttgcaattataaatgctaatgtgggcataatactgaattgtagacagacaccaataattactgctctaggtgctttaaagaccattttgaaatcattaggtgtaattgttaatcccatacctaacataacaataccaagtaaataaggtacccatttacctaatgtcgcaacatgttgtgggaaaataaatccaataacagctgctactaacatccataccaaaaaactcttcgtggcaaatatactcaatttttgaaacattgttaacacatcctcgtcgataatattgaaaaatattaccataagaccagtaaggttacaattacttttctgaaaattaagattatttagtcattctcttcttattgcaaatattttatcactgataaacaattattttaaacttcattcaaaagtcttagtgaataaagaaaaaagcgtggtaaaatcaacttgaacaaaattaagtcacctttataaatattaaacgtgtatttaatgccatgtattcctcgggaggtcctcacatgttaattgataaattcgaaacatacatcatcaacatcgccggtttaaatgaccgtactactagaaaaaaattaagtaagttatgcaaaagtgtacaattttgtgatgcgttgcaattctcaataaacaaacagtttaatcagtatgtattagaaattagcttaccaaagcaacaacttccatacttcatttcatttttaagttttcatcagtatagtattttccaagtactttcaccaaagaaaataaatgaattacttgattctgataatttatatcaatctgcaaagcgtttcgatatcaatattgatggcttgcaagatgctttcattaaagacaaagtcatcgatattatgaatatgttccaaaatcacactgatatcacttatacgttgaataagtctcatgcacatattatatgtacgccagaaatatttgctaaattgttacatacgattgcaactagaaatatcgacattctatctgccaattatagatcgtcatctatgagcaaagctcgtatatcataataaaagacacatctatacgatgatcatttacaatgattgcgtatagtgatgtgtctttttttgtattatttatcttcggacgattgatcctcaaccatttgttcaaatgcttcacgaacttgtggtactgtcatacctactacaacttggatactcttaccactctttactaatccgtgtgccatttgttgatgcgtgaaatattccgtatctgcaactttactttcatcataaacagttaagcgtaatcttgttgtacagttagtaacatctttgatattttctttgccgcctaaaccgtcgaggtaatatgcagctttgtcttcgtattcattaccagatgaagcacgtttagaatctacgctatcaccttttttatttttgtaatcttgcttagaaaataatttaacttcctcttctgttttcttacgtccaggtaatggaatatcaaatttcaaaattaagaatctgaataagaagaagtaaatcgctacaaatatcagaccgataataacttgtgcaacataagtaccccaatgttctttacctaatggcaaccagtttgttgaaataaagtctaacaagccaccacccatgttacctacaacaccaaatgcgtacattaaagtatccattgatgctgctaaaactgcgtgtaaaacaaataagtatggtgcgatgaataagaatgtaaactctaatggctcagtaatacctacaacgactgctgttaatgtggcaggaataagtagtgccgccacctttttacgattttctttaggtgtcgtagcatacattgctaaagcaatacctaaacatccaaatactttcccatttccttgaagcataaagccataagggaattgctcttttaatggcttagtactcttagcaaactcatttaaatgttgtaaccattcagctttcaagccgtgattgactactactggtccaacttcaattggtgcataaataaagtgatgtaatcctgttggtattaatacacgttctaagaagtgatacaaccatacaccgatatagcctgaagcaatgataaagtgttgcattgaaccaataccgtgctgaacagttggccaaataacacaagtaattgctgctaatggtaacatcacaaaaaatgaaatcgtaactacaaatgttaaaccttggaatacaccaaccatttctggtaatcgtttactatagtatctattgtgaatccaagtaataatagctgaaataataataccacctagaatattcgtatccaatgtggcaatacctgcaattgattttaaaccaggtacattttcaacgcctttttctaaattagcgccaaacgtatgtggccattgtgttaaaatggcatttataaatgtattaaacattaagtaacccatcaatgctgcaagtgctgcatgacctggtgcttttttagctaaagaaagtggtagacctacaacaaatacaacttccatatgcgtaaaaataacccagccaccagattctattactgaccaaaatttaaaccaaaacgtatgttgatctgctaaactccccatgattgtaggatttttaaataatgtcgcaaagccaagcactatcccaaagaaagcgaacattaataccggtacaatcattgcactaccgaaacgctttatcgcattcatcttctattccctccatatcatctttcctaacaatacatctaattagattcatttataaatagatgtcttactatttaaatataatatatagtaaacgcttacacacctacaacgacattgacgtattttgaaagtattttgtataatcagattatcttttcatatagtgaaaattttttcacgaccttatatatgacatcgttgtatttgtaatacattcgttttaaacgcataatcaaacctatatcaatacacaaatatatataatgacatacaagattttaatgtaataacgatctattacacatttattttcaaggaggttgaatatgtttttagatgaacacattaatcgaaactttgataaacttaatgataatgatttacatatcgctcactttatcaatacacatatagatgaatgtaaaaatatgaaaatacaagatttagcgcaattcacacatgcctcgaatgcaaccattcacagatttacacgcaaattaggttttgacggttatagtgattttaaatcgtaccttaaatttgaaagtaataagacacaccaattaccttctaactctatcgatagtttcaaacaagaaatcgatagtacattcagttatttagaacgcgttgattaccagcttcttactaaaaaaatgcatacagcttcaacaatatatttgtatggtacagggcgtgcacagttaaacgttgcttcagaggcacagcgtatattgttaacgttacataatcatgtcattgtacttcatgatgaacatgaacttaaaatgattttgaacaagagtgaacctaatgatttattctttattatttcattatcaggtgaaacacatgaattattagaagtaacaaacttgcttcaacttagacaaaaatactttatttctgttactacaatgaaagataatacccttgctcaaaaagcaaattacaacgtctatgtatccagtaacacattctacttaactgatggtacagactattctagcttcatcagttatcatatattctttgaaacacttgtaagaaaatataatgagtatttactacataatgatatttcaaattagaaaaaaggaagttatgatttaatggccttgagcctatcataacttccttttatcattttattgttgtgttgatgtttcgataacgtggtacatcttatcaaacatcaattcgaaaccatgcaccatggcatcatgatattcttttttcttttgcttgtattctaaattagtaaatcgtctttctttttcaactaatgaacgataataaaatagcatttgggtgccacctgtttcacgttcaaaaaattctacctcaatgacatcttgcgtttcacttagtccaggcataccgatagtcatcttaacgtattcatccataactaaagattcataaatgccttcaatcacatttactttgccattacgttgttgatctacaatacgatatttaccgccttctttaacgtccgcttcaatctctttattcgttctggctgatgtcataaaccattgtttcaacaaatctttctttgtccaagcttcgtatactaactctggagaaaatttataaagcttttcaatttcaacttcgacatgttcattctctacattaaattttgccactgttgtccacccactttcgctcttacttttattttaacgtatttttgctcagttccaaacatagatgatcatcatttttaaaagattagcgttatacggtgagtacaacatgatctgttaatataacaagccaccttacttggctacatcgatatattgttaagcattaatgtttcatttcttgactagtgttcttttttagctttggaaaattaaataaaatcgcaataagtccgcatacacctaataatataggataaatgctgtatgggaataacattaacggtgaaataccagctacaccagccgctgaaatgacttgcgggctatatggtaataaaccttggaagcagcctccaaatatatcaagaatacttgctgatttccttgaatctacatcatattcatctgcaatatttttagctaaaggacctgacataataatagagatggtgttgtttgccgtggcaatatctgcgacacttaccaaactagcaattcctaattctgcgccacgctttgatttcactttagagcgaacaaattgcaacaaccattcaataccaccattgtgttgaataataccgactaaaccaccaattagcaacgcaatcatagcaatatcttccatgcttataatacctttggacactgcatctagtagccccatccaaccgaatgaaccatctatgagaccaatgattccggctaataatgttccgccaatcaatacgataatgacatttacacctaataatgctaataccaatactaagatatacggtacaactttaattagattataatcatagtttttagcatgatttaaagaaatgccattcgttaagaaatacagaataataatcgttaaaatagcacctggcaatacaattttaaagtttactctgaatttatctttcattttcgtatgttgtgttctaaccgcagcaattgttgtatctgaaatcattgatagattatcgccgaacattgcacctccaacaactgtagccattgctagcgcagttggtacatctgtcgcttgtgcaaatccgtaaccaacaggtgctattgcagcaacagttcctacagacgtccccatagatatagaaacaaacatacaaatcacaaacaatcctacaataattaaattttctgggattaatgatagtcctaaattaactgtcgactttacgccacccattttttcagctgtatttgaaaatgcacctgctaaaataaaaatcaacatcattaaaacaatgtttgaatggcctgcacctttcgtgaagacctcaacttttttagcaaatgattcttttcgattcattaataacgccacaattaccgttatcgtaattgcaacatttaatggcattgaagtaaaatcacctgtgataatacctacgcctaaaaacaacgccacaaataataacaaggggaataatgcccaagcattgctctttttatgtacttccatcctttttacctgctttccaattaaaaatacctctttctcacaaacgatgaagaaagaggttttcatgtgctttacctgcttatcttcaaaccattacggttactggaattggcacattcgagatgttgccgaggcttcatagggccagtccctccacctctctagataagtgatgcttatttacgtttacgttacaagataatccttagtacgtcaatcataaattaatcaggagtcgtataatatttttcataaacaatcattgctactgtaataataatcaaaacaataatgctaataacaagtaaaagccaccatttaagcattaatgcaataaaaatgaacacgatagacacacttactaatattaatgatatgactttaaattgctgaacacgttgcttggagatgactttcaactgtttgtttgatagacgcgtattttttatactgattcccagtatattttctaatatttgaaccaatacgatacttattgcaaatataataattggtaaaacatcatagctccctatagttaatgtataaattacaaatccaatgtaaagtaaccctgagacaaaggataaaaagtatgcgacgtatttgttaaacttaatgatatgctttttaacgttttgatgtgtaaaccatacattcgaaacgatcgcaactgctacaaataatgtgaatactatatataatggtaatttttgttcaggaaaaacagtcgctattccaaaagctaatgctaaaatcaaaaataatatagctctagatactattaatgccataataacaacccctttgtttaatatcgagtttgcaaatttacgtttatcagcgtttctatgatcagtacttctacgggtagcgtttctatgtaatttacatcatcttaacatataaatacttcgctatttaattgaaaacatatcctattattctttgtccgttctgacgtttaatatctagccttaggcatttcacttgttaatgaatttaactttcttccactaaccgtccctaaacccaatcccgcaacagtttttaactttttcgttgttgtcctgacatcctcattaagaaagtttattctgcttaaaacttataatccacaccctgagcaaacgctccttatgacagagtattaaaataagccgataaagatacacacctttaccgactatttaaaatacacttcaccaattcattttaatttaatggattgaagtaactaaattaatattatgttgttcaattaaaagcttcatacaaacctaatctatttgcactccaccgctaacaccgaacacttgtccggttgtataacttgattcttctgacgctaatagcacataagttccacataactcaacaggttgacctgcacgacctaaaggtgttttttgaccaaatgttgggattttactttgaggttgtccaccagaaatttgtaatggtgaccagaatggaccaggcgctacacagttcactctaattccttttggtcctaattcttctgaaaaacttttagttaatgaaataattgctgcttttgaagcggcataatcatgaagaataggactaggattataaccttgtacagatgatgtcgttgtaattgacgcacccggttttaaatattccaatgctttttgaactgtccaaaatagcggatagacattcgtttcaaatgtttctgtaaatgcctcagttgtaaatccatgaatatcatcatgatactgttgatgtccagcaactaaagtaacattatctaagccacctaattgttgatatgcttgttcaacaaggtcatagttgaactgttcatctcttatatcaccaggaattaacactgccttttgaccactttcttcaatcacttggcgtacttcttgtgcatcttgttcttcactcggaagatagttaatcgctacatctgcaccttctttagcatacgcaattgctgctgcacgccctattgctgagtcaccacctgtgactaatattttatagccttgtaagcgttgatgaccttggtaagacgtttcgccacaatcgggtgctggcgtcatttcagattgtaaacccggtacctcttgttcttgtttttcataatccgttgttttaaattttgttctaggatcttgagctgccatttttttacatctccttattcgcttaatggttattatttacccaatcttcctaggaacttaatcatgattacactaaaaattactttcttctttataaaaacaagctcgaattattcatgcaatagtctctttacaaattcaacaaaatactcaggtactttttccagaatcctttcatccggtttatattgaggatgatgtaaatcatattcactatgagaaccaattaacgcaaatacacttggaaaatgttgactataacctgaaaaatcttctccaatcgtaagcggctgttccatcattcccaccttatatccaacatgttgggctactgcaattgctttatgcgtcaatgcctcatcattcatcacagcgccaggtaaatgcgtataatttaaattaattttcatattatatgcttgagccaatccgtccgcaatatcttgtaatcgtgtttctacaagctttcgtaccacaggatcaaaactacgcactgtgccttgtacatacgcatgatcagcaatgacattccaagtattaccacatgatatttgtccaattgttactaccgcttcatcaaacgcagatagatttctactaactatggattgaatactattaatcaattgcgccaacacaataactggatcgttgcattgttctggctttgcagcatgaccacccacgcctttaatatgaaactcaaaacgatctactgctgatgtaattgcccctgttttgattgcaaatgtacctaccgaacgcgatgggtcattatgaaaacccaatactgcttgtacatcttttaatgcatgtgtttcaataattttaaaagcgccatgtcctagttcttctgctgattgaaaaatgaatttaacacgcccagtaagagtgccctcaatttcttttaattttacagctgtagccaaaatactagccatgtgaatatcatgaccacacgcatgcataacaccttcattttcagatttaaaatcctgttcaacaagctcttgaatcggtaaagcatcaatgtcagcccgaacagctatacaactcagaccttgtcccacttcagcaacaagcccagtcgcaagtggtaagtctaatattctaatatgatgttctgttaaaatatctttaattttttgtgtagtcttaaattctttatcggatagttctggaaattgatgaaaataccttctccaggtaacagcttgatcttttaatcccatcggtcattccccttccttaagtcaatgatatgttgtctaccctacgatgatcatctttgactattaaacgatgatttcacaacaatgtactcttgttaattgctttcgttaatgatagacagttgtttaataatatcgtaacactgttgtcaaactattctaacttttataattgagactctatacaaaaacgtgttctcgaatatacttgtttttacaaaccacaaaaagctctaaacattagtttaaaccaatgcttagagctttctaattattttatgctttaaaagatactgtgttatctacgatgaccttaccgtctttaataactttttctgcgtgattgataccaaaatgatatggaatatattcatgatttggtgcatcccaaattactaaattagccttatcacctgtgttaattgtacccgcgttaatgtctattgctttagcagcattgaccgtaacagcattccaaacttcattaggtgatagctttaatttcaaggctgcaatcgccataacaagttgtaagttgtttgtgacactactaccagggttataatcagttgctaatgcaatcgcaccgttattgtcaagcatgcctcttgcatctgcataatcttctttacctaaatagaacgtcgttgcaggtaagaggacagctacagtatcactatttcgcaacttttcttttcctttatcactagaagctactaagtggtctgctgatattgcttgttcatcaattgctaattccagtccgcctaacggatcaatttcatccgcatgtattttcactttaaaacctgcttctttggctttttgcatataatgttgcgattgttctattgtaaatacacctgtttcacagaaaatatccgcaaagtctgcatattgttttacttccggaagtaacgcaatcatttcttctaaaaatgcctcatttgaacttgcctctttaggtacagcatgaggccctaggaaagtatgtttcatgtctaaatcatatttctcagctaaacgattagacactttcaattgcttcagttcattttctctatctaatccataaccactcttactttcaactgcaagcacgccgtgtttaatcatagtaagcaaatcatgctctgcttttttaaacaagtcatcttcggatgtttctctagtagcattaacggtagataatatgccaccacccatttctaatatttcaaggtaagacttaccttgacgttttaatgacatctcatgttctcgagatccaccaaatgttaaatgggtatgtgcatctactaatgctggggacactaccttcccactagcatcaatcgtctcagtcgcatcgtagtcatctgtatgtgttccagcatatacaattttgccatctttaatgacaactgtaccatttttcacaacatttaattcatctaattccttacccttcaaaggtttatctgttgatctcggtaaaattaattctgctatatgattaattattaaatcattcattacttatcacctgctttatcaatcattggaatatgaatacctttttctttagctgtttgaatagcgatgtcatagccagcatcaacatgtcgggcaacacccatacctgggtcagtcgtcaatacacgttccaatcttctttcagcacgctctgatccatctgctacaacaaccatacccgcatgaagtgaatatcccatgccaacaccgccaccgtgatggaatgaaatccatgaaccacctgcagctgtgttaatgagtgcattcaatacagcccaatcaccaaccgcgtcactaccatctttcatactttctgtttcacggttaggactagcaactgaaccagcatctaaatggtctcgtccaataacaattggtgctgaaatttcaccgtcacgtacaagacgatttaaagctaagcccattttcgctctttctccatagcctaaccaagcaatacgtgatggtagtccttgatatgaaattttttcttcagctaaatcaagccatcttaataacttttcattttctgggaaaagtttgcgcatttcttcatccgcacgctcgatatcttttggatcaccactcaacgcagcaaagcggaatggccctttaccttcacagaataatggtctaatgtaagctggtacaaagcctgggaagtcaaaagcatttttcactccgttattgaaggctacttgacgaatattgttaccataatcaaatgctacagcgccacgtttttggaattcaagcattaattcaacatgctttgccattgaagcttgtgacagttcaacatattttttcggatctttttcacgcaatactttcgcttcttctacagagtatccttgtggcacatatccatttagcggatcatgtgcacttgtttggtcagtaataatgtcaattttaaatcctttttctagaatcgcttgatggatgtctacagcatttccaactaacccgattgataatccttctccacgttctttcgcctcttctgctaattttaatgcttcatctaaatcagctgttttaacatcacagtatttcgtatcaattcgcttatcaacacgtgtttcatcaacatccacgcaaattgctaccccatgattcatagtaattgctaacggttgcgcaccacccataccacctaaacctgctgtcagtgtaacagtgcctgctaaatctccattaaagtgttgattacctagctcggcaaatgtctcataagtaccttgcacaataccttgagaaccaatatatatccaactaccggctgtcatctgtccatacatgattaaaccttttttatctaattcattaaaatgatcccagtttgcccattcaggcactaatactgaatttgaaattaatacacgtggcgcttcttcatgtgttttaaatacagcaactggctttcctgattgtactaacattgtctcatctgattctaattctcgtaacgttttctctattgcttcaaaagcttcccaattacgtgctgcttttccaataccaccataaacaactaaatcttctggtctttcagcaacttctgggtctaaattgttgtataacattctaagtactgcttcttgttcccaacctttacactcaatactcaaacctttttttgcttgaatttttctcataaaattcgctcctgttcttttaagaagttaattccactaaatttaaaacgcttacattattatcttcaatattcattatagtatgttaaaatatagccaacaaatataaataaactaattatccatagcttgaatctataaataaaaggagcaaaacacatgaaaattattcagttagaatacttcttggctatcgtgaaatataatagttttactaaagctgcacaatttttacatattagccagccatctttaactgctacgattaaaaaaatggaagcagatttaggttatgacttatttacacgttcaacaaaagacatcaagattaccgaaaaaggaatacagttttatcgttatgcgagcgaattagttcaacaatatcgatccacgatggaaaaaatgtatgatttaagcgttacatcagaaccaaggataaaaattgggactcttgaatctacgaatcaatggattgcgaatttaattcgaaagcaccattccgactaccctgaacagcaatatcgtttatatgaaatacatgataaacatcaatctatagagcaattactgaattttaatattcatttagctataacaaatgaaaaaataacccacgaagatataagatccattcctttatatgaggaatcttacattttattagcacccaaggaaacatttaaaaatcaaaattgggtagatgttgaaaatttgccactcatattaccaaacaaaaattctcaagtgcgcaaacacttagatgactattttaatagaagaaatattcgtccaaatgtcgttgtagaaacagatcgattcgaatcagcagttggatttgttcatctcggcttaggttacgctatcattccgagattttattaccaatcatttcacacgtctaatttagaatataaaaaaattcgtccaaacttaggccgaaaaatttatatcaattaccataaaaaacgcaaacactccgaacaagtacatacattcgtacaacaatgccaagattatttatatggacttttagaggctctttaacttaagttattagagcctcttatgcagttgctcagtcaactgtataccttttgcctttaacttaagttattagagcctcttatgcagttgctcagtcaactgtataccttttgcctttaacttaagttattagagcctcttatgcagttgctcagtcaactgtatacctttttcctttaacttaagttattagagcctcttatgcagttgctcagtcaactgtataccttttgcctttaacttaagttattagtgcctcttatgtagttgcgtagtcaactgtataccttttgcctttaacttaagttattagagcctcttatgcagttgcgcagatcatcgtataaaaattaatgacgtcatttcaaaaatcgatacaaaaataatttattataaaaattctaagaaagaagtgaagcagatgttaaaatctattaatcatatatgcttttcagtcagaaatttaaacgattcaatacatttttatagagatattttacttgggaaattgctattgactggtaaaaaaactgcttattttgagcttgcaggcctatggattgctttaaatgaagaaaaagatataccacgtaatgaaattcacttttcatatacacatatagctttcactatagatgacagcgaatttaaatattggcatcagaggttaaaagataataacgtgaatattttagaaggaagagttagagatattagagatagacaatcaatttactttaccgaccctgatggtcataagctagaattacatactggcacacttgagaacagattaaattattataaagaggctaaaccacatatgacattttacaaataaggtgtcattataaaaaggcctcttgaactccgttaaaattttaattaattattatataataagagaacttttcaaacaatacagttgttatttttgctatttcaacaaacataaataagcagtaagatgactacaacttaagagtcttcttactgcaattatttttcaaatatatcaacgttaatataacttctattaagaaatactcacattctgccctgcaatgcaaatctcgtcacatataaatatttttaattattttaaaaaatgatgcactaaattagcaacgagcttagcagttctattgtcagcgtcatatgttggattcatctcagcaatactaactgaagacaccttatcacttggaataatacgttttgctaattcaagaacagtatgtggatacaaacctaacactgccggcgcacttaccccaggcgcaaacgcactatcaatgacatccatacaaatcgtaaacataatgacatcatgttcatgtacaaaacgttcaatcatatctttaattgttggtgatacgtgactcaataattcatctgcaaagacataatcaatctttttctctttagcataatcaaataaactttgcgtattaccaccttgagcaataccaagcactaaataatctgtgttttcatcttcttctaaaatttgtctaaagctcgttccagatgtagattgttgttcagcacgtgtatcaaaatgcgcatcaatatttatcacaccaatagattgtgttggatagactttacgtgttgctaaatattgagcatacgcaatatcatgtccaccacctaataaaaatgtttgtctatgattagcaattgacttcgctgcaagcatagcaaattctttttgagtatcaattaattcctcatgatcatgataaacatttccgtaatcgactaaagtttcacattgattcaaatccggcaaacctgcaaatgcttgtttaatcgcatctggtccttcttttgcaccaatgcgccccttgtttaaagcaacacctttgtcaacagcatagcctaatataccgacccctgatggcatactactcttttccagcttagacaaatcttcaaatgttactgtttgaaaatgtctaaattttttcgggtctgtttcactatctaaccttccagtccataaatttggttcaccttgcttgtacacagcatttccccctcttatttatgtggcttattaacaattaaagtataacgtataggaaattttgaattcaattcatagttaaatccgtatcttaaaaatacttatctacattacttttacccctattttctatgtaataacgaatacttagctgatttatgttaataaaatacgtcaagactattacattttcattaatattgacatagacaatttatctctcggcttgtaatatgtataattgttactaaaagatattttgcttgttacctaatggaggttacatataatgaagaacaataaaatttctggttttcaatgggcaatgacgattttcgtcttctttgtcattacaatggcgttatccattatgctcagagatttccagtctataattggtgtcaaacactttatatttgaagttacagatctagcaccattaattgctgcaatcatttgtatactcgttttcaaatataaaaaggtccaacttgcaggtttaaaattctcaatcagcctgaaagtaattgaacgtctattgctagctttaattttacctttaattattctaattattggtatgtacagctttaatacatttgcagatagctttattttattacaatcaacaggcttatcagtacctattacacacattctgattggacatattctgatggcgttcgtagtagaattcggattccgttcatacttacaaaatattgttgaaacgaaaatgaacacgttctttgcaagtattgttgttggtttgatgtattcagttttctcagcaaatacaacttatggtacagaatttgctgcttataacttcctttatacattctcattctctatgattcttggtgaattaattagagcgactaaaggacgtacaatttatattgcaacgacattccatgcttcaatgacattcggacttattttcttgtttagcgaagaaatcggcgatctattttcaatcaaagtcatcgccatttcaacagcaatcgttgcagtaggatacattggtttaagcttaattatccgaggtattgcatatttaacaacaagacgaaaccttgaagaacttgagcctaataattatttagaccatgtcaatgacgatgaagaaactaatcatactgaggctgaaaaatcttcttcaaatattaaagatgctgaaaaaacaggtgtagctactgcatcaacggttggtgttgctaaaaatgatactgaaaatacagtggctgacgaaccaagcattcatgaaggtactgaaaaaacagaacctcaacatcacataggtaatcaaactgaatctaatcatgatgaagatcatgacatcacttcggagtcagtagaatcagcagaatcagttaaacaagcaccacaaagtgacgatttaacaaacgattcaaatgaagatgaaatagagcaatcattaaaagaacctgcgacttataaagaagacagacgttcatcagttgtaattgatgcagaaaaacatatcgaaaaaactgaagaacaatcttcagataaaaacaaataataacaaagcgcttgctagtacctcttaaaaagatgatgctagcaagcgcttttctatactatatattatttttctaaaattttaacaccctcttgagtgcctacaataacttgatctgccatatctaagaagtatcctgtctcaaacacacctgtcagatgaattaaatactcatggaacttatatgggtcaattccttttggtaacttacaatctaaaatataattgccattatcagttataaatgcgacatcttcgtttacacgacgttctacttttatatcagcgtatgattcaattttacgtaatatgtgataccagttaaatttatccacctctactggtaacttaaacgtctcacctaagtattgaactattttcgtttcatcgacaaccacaacaaaacgcgatgccatttcatctataactttctctctgaacagcgcaccaccgccacctttaattatatttaaagatggatctacttcatcagcaccatcaattgctaagtcgatatgatcaacatcattgatttcacatattttaatacctaattcttttgctaaaaatgcaattttattagaagtgcatacacctgtaatattgtaaccacgttctttaattagttgcgccatttgaggtaagagtaattccattgtacttcctgtaccaattcccagcgtcatgtcaccattgatttgacttaaaacatcatttaatgtcattaacttgagtgctttgacatctttcatgaaggtagcctcccatatttatgtaatctattcaattcatattttacatgactcgtataaattaacatacccttatttctaacatttttttaaacatatcaatcagaatttacaattctaaaaatgttttatagtacaatatattttaaataatactcgttaaggagaatgatatgatatcaattcacgcaatttcgacaggaaaaatccaagatttgccttatagctcgaaaagaccgatgcgctctgctttagataaaactaagatttcacaaacaacatggttatcttcaactggtttcactggtgatgaacaggcttataaagatcatggtggaccacataaagcagtttgtgggtttagtaagcataattatgcactgtatcaagatgatttacctacactacctactcatgcgatgtttggagagaatttaacatttgattatttagacgaatctgatgtttactttggtaatcaatatcgtttaggtgaagcgttaattgaggtttctgaaattagagaaccatactggaaaattcaagcaaaatataatattcctgatttagtgaagcgcatgtctacatctggtaaaacaggtttctatttccgggtattaaaacaaggctatgtatctccaaatgatcagctttacttaatacaagaagcaccaatcgaacatcgtttatctgtacaacagcttaatgacctttattataatgatagacaaaatcaagatatgttacgatatgcactaaacaatccatttctgtcaccaacaagacgcgataaacttcaaaaaatgtataacagaacattgaaataattacctttcattataagtgttaaatgaacttttcaaaacaaaaaggaatcaacttacacatcgtttgtataatagtcttatctataaccactgatgctattgattccttttttatgttatatattttctttatttcaaactgtatattaatgatgtcacttcatttgatacgattcttgataacctattcaaaattccgccaaataacataaatattatataaatgccgatacttttaatcattttctactttttcttcgatacggaaacttgttttcgaattgaacacttcaccagcttttaaaattgacggtgctttttcaccatataaattaatatcatttggtaaaaattgtgtttctaatgtaaagccagaatgtggtttataaatattaaatggactatcccactcatcaggctggttaaaagtaaagaacacaacatgaggcatatctgtatcgacctctaacataaattcatgattttcaacatacattttatgttcaccaactgtaaatgggtgatcgagaccaccaaaacgtgtcatttgttggcttaattgcgcatgttgtgatgtaaaaatatcactcaattttatcttgttatcttcaaacacttcatgtaaatctagaatatcacctgtaacaatatttcgctcatctaatacatacatatctaattgattacttgaaatgcgatgattatcaacgacattattatctcgattcaaattgaagtacacatgattcgtaggactaaacaatgtgtcttctgatgcaactgcttcgtattcaatcgaccattggtgatccgcatcataaatatgtgtaatcgtcacatcgatatcacccgggaaatgatcatcagctgatttcaacaccgtcttaaatataactttaatttgagcaatttcatttctaatttcataatcaaataacttattgtccaaaccatgacatccaccatgtaaatgatgttcaccgttgtttttttctaactgatattctttacctttcaacttaaatttagcattatcaattctaccgctatatcttcctatagaagcaccaaatttaaaaggattactatgataaaattcatccgcttcaacaacatttccaagaacaatattattatcatgatatttccaagacactactcttgctccataattcgtaaaaataattttagtttcatcattatcaattttgattaaatctacaccttgtctttggtgctcaacttcaactatcatttttacttctcccttctaaccacaagtgttcaagctctgctgggtagcaacattactaaaacacctacaatacaaatgattgcaccgataacatcatatttatctggcatttgtttatctacgaccatcgcaaaaatcaaactcatgatgataaatacgccaccatatgctgcatatactcttccgaatgatggaaatgattgaaatgtcgcaatgacaccatataacatgagtatcgcaccgcctattagcccaacaagtgaagactgtccttccctaagccacagccaaatcaggtatcccccacctatttcacataagccagctaatataaatataaaaatcggatataacatgaaatcactccatcacacatttgctatcaataatctatcggctacatatcatttgtttacatttcttcttacttcacattcccattttaaaaagttcgttttcacattcatattgtacacttttttagacattattctatagctaaatataaaaaaataagagtaacacgctttcatcatcattttatatgataaatgtgtgtcactctcatcaattttattttttaaatacacgtttcattgaattaaataagccacgttcaaatgtaagtactgaatctttatatgttttaattgcaatccatatcaagacagctaccattacaattgagattaaagaacttaagatgacctcatatatttgaagccctgaagtttgagcgcgtacaactaattgaaatggcgctaaaaacggaatataacttgtgattaaagcaagttgtccatcaggattatttatcgtgaatatcgcgatataaaatgcaatcataccaagtaatgtcagtggcatcaaagattgatttaaatcttctattctagatgttaatgatccgaggatggctgcaagtaatacatacgccgtaattccaacaatactacttataattccgacaataataatttgccaagacaattgattcatttccacgttaaaaccttgtagcaagtcttttaagtcaaaggcaaaaatgcatataactgccatcaatacaattaaaataatctgagtcacggcaactgctataacgcctaaaattttagcaaaaatatgttggattggtgaaatacttgtaataatcatttcaatgacacgcgatgttttctcactagcaatttccatagctatttgagatgcataatttaaaacaatgaagaacattagaaagataatgccataagctaaagcatagttgaaaatcttttgtccttctgatactttatcgacttcatcattagaaatcaccttattatcaactttactttgtgcttgtaatttttgtaagtcttctttgttgatatttaattccccggctaccatatttgtttgaatagctgtaagcagtgcttgtactttttgtgaatcttcatgacttactcgcttctcactaatgattgtcccttgtaacgtgcgattttgattcaccttgataatataagctttatcaagtttatgtttttttacttctttttcagcatcttctatagaaactttagtaaacttagcatcactatgaaatgtattcgcctgttgcttgaaaaccttatagatttgttcattcggtgctgctacaccaattttatctggaccatcatcaaacatgttaataatcttatcaatgttagataggccaatcattaaggcagcaataataatcataaaaattacaaatgatttagctttaatttttttgatatatgtcaaagtaaatgtcgcccaaaacttatgcatccttgccaccaaccttctcaatgaatatatcttgtaatgatggttctacaacttggaatcgtttaacataaccttgatgtgccacaacttgataaatatctttggctacgtcttcattctcaatcgtcaactgaagaccttgcttcatgttttcactatgaatgatgcctctaatgtttgttaaatctggtagtgttgtttctgattcaatgacaactttcttgttaccattagatgcacgtacatgattgatatcaccagaaacaacaagttgacctttatctaaaatacaaacatcatcacataattcttcaacatgctccatacggtgagaactataaacgattgtactgccccaatcatttaagtctttaactgcttcttttaataactcaacattaactgggtctagaccactgaaaggctcatctaatattagtaattctggtttatgtaacatacttgctaacagctgaattttttgttgattcccttttgatagactatcaattcgttttttgcggttttcagtaatatcaaaacgctcaagccaatacgatatttgctgttgtatttctgtttttgacattccctttaaagttgccaaatatttcaattcttcttcaactgtcaatttcccatgtaaaccgcgttcttccggtaaataaccaatacgattgtacattgttttatctagttttttaccgttatacgtaatgtgtccttcagttggttcacttaagcctaaaatcatacgaaatgtcgttgttttacctgcaccatttcttcctagaaaacctaacattttacctgattctaactttaatgaaatatcatttactgccgtcatcttgccaaaacgtttcgtaacatgttcaattacaagtcccatactttgcctcctaaaaaaatatgtatttatcttaatataacatttccattctctataaatgcaatatttttaaaatgaatttatttttaaaatttctgaaattgaaaaatttaaatagtgccatttttgcatgttaagtatcattagcactagatatgttttttccatgcctttattgccttatttgtaaaaaaatatcccagcatcattgtgccgagatatttatatcattacaattgattatctgtttcttccggtgttttcggtgtttcagatgtacacgctttttccggtgtttcagatgtcactggttgatttttaattgtagacgggtattttgggctttcgccatatttatttgccggcttactgtcaaagcataggaatactatcataacaattgttaggcctaaataaacaaaataaagaagtactaacaaaatattaagacccatcggcattaatgtaaaatcactgtcataataactatcgataatctgtaatactatataaaatataatactgaatactgtcataatcattggaaataacattgttcttgatatatcgtgaaatcttcgaacgcacaacgctaaatttggaataaacgttgccaaactatagacaaaagtatacacagatgtaaggataatcatcaatatactcataactattaatgtttcgttatccgccgctatagaaataaagaatagaaataggtttattattagcacacacacagctggaaccataagtatcaaatgccatagtgccatataccaatattcactacgtcttgatctccccttaaaatttacataatttttccaaaataaaacgaatgatttcataaaacctacttgaggtaattgttccattgtaatctccctttcgttaatcatatttatatttttaattattgttaccgttataatttacaagattcattatcaagccacttcatttcaatcgtcaatcactttggaaaatgaactttatatttcatcactagtaaaatgaaaacccgctacaagtacacatctatatggagactcatttgaaagtcaacgcttcgttaactatactaaaaatatgtcatactgcaatgttcacgtttaaaagagtctcaatctatgcaaataaaatattccataacaaagtatatactttacatttttataattcttaacaatactattttatcaaacatttaccacaataaaaatatctttttcatttttatttaaattaatcatataattgcgaggagaatattatggatttcgttaataatgatacaagacaaattgctaaaaacttattaggtgtcaaagtgatttatcaggataccactcaaacgtatacaggctacatcgtggaaacggaagcttacttaggtttgaatgatcgtgcggctcatggctatggcggtaaaataacacctaaagtcacgtcattatataaacgtggtggtacaatttatgcacatgtcatgcatacgcatttactcattaattttgtaacaaaatctgaaggtatacctgaaggcgtacttatccgcgcaattgaaccagaagaaggtttatccgctatgttccgtaacagaggtaagaaaggctacgaggtaacgaatggcccaggaaaatggactaaggcatttaacattccacgggctatcgatggcgctacgttaaatgactgtagattgtctattgatactaagaatcgtaaatatcctaaagatattattgctagtccacgaatcggtattccaaataaaggtgattggacacataaatctttacgttacacagtgaaaggtaatccatttgtgtctcgcatgcgtaaatcagattgtatgtttcccgaagatacttggaaataaatgccatctttcattgattactatcatgaaaatgaaatctatctccttataagtcaatcaatcgtgccgtcaacatgcggatgggttgattgtttttctttgtatccatcatattttttgattcatctcctcttattgaacttgttcttaattataaaatataacaatagaattatttataattattaaatttagatgcattaatattattgatattattttcaaaaactagaaatattgatttgttgcatgtataatgttaaaagcgcccttttataacgcttacatataaaagcttatttagggagagggatattcaacaagggggatttgaaaatgatagaacttaatgcaattacaacattatgtttagcttgtatcctttatttacttggtaaggctatcgttaatcacgttaattttttaaaacgtatttgtataccagcaccagtgattggcggcttaatctttgctattttagttgcggctttggattcatttggcatggttaagattaaattagatgcttcattcattcaagatttcttcatgttagcattctttacgacaatcggtcttggtgcatcattgaaattatttaaattaggtggcaaagtcttgctattatactttatgttttgtgctatcatttcagtcattcaaaacatagttggtgtatcactagcaaaagtattaaatattaaacctttgttaggattaacagcaggttccatgtctatggaaggcggtcatggtaatgctgctgcttatggtaagacaattcaagatttaggtattgattcggcactgacagcggctcttgcagctgcaactttaggtcttgtatttggagggcttatcggtggtccagttgtaaaatttttaatcaaacgttataacttaaagcctcaacatagtgacgatacatttaaagattatagccaagtagcatataacgaacatttacatagtaaatttaatgccactgaagtattcttcattcaatttacaatcgttgtattctgtatggcagttggaagttatttcagtcatttgtttacagctcaaacagggattaatgttccaatttacgttggctcattatttgtagctgttattgtccgaaatatctctgaaagttttaattttaatattgtagatttaaaaattactaatcaaattggcgatgtcgcattaggtattttcttatctcttgcgctaatgagcattcaattaatcgaaatttataaacttgctatacctcttattattatcgttttagttcaagttgtcgttatgattttatttgctgttttaattttatttagaggtttaggaaaagattatgatgctgcagtaatggtaggtggttttatcggtcatgggcttggtgcaacgccaaatgccatggcaaatttagatgttattactaaaaaatatggaaactcacctaaagcatatttagttgtacctattgttggtgcattcttaatcgatttaattggtgttatagtcattatgggattcatacaatggtttagttaaacaccaaactcataaataaaagaggaggccttcgcctcctcttttatttatcctcgatgtatattcaagttacgttgttctatccatgacaatatttccggactaaatacgatttgtttttgtgttaagtcgtcaatatttttagcatctaacatcgtcattattgatttcatgtgttcaataaatgattctacataagctactgtatgtgcaatgccattattttcaacttgatttaaaaacggacgtgacataccagttgcctttgcaccaagtgctaaacttttaattgcatcgagtggtgtacgtaaaccaccactcgcgaaaactgaaatttcgctttgataagccgttgtttcaagtaatgactcaactgtagactgtccccatgatgataagtaatccatatctttatttgcacgacgttcattttcaatatctacaaagttagtaccacctttgccactaacatcgacatacttgacgcctatttgttgtaagtcatgcattaattctttgctcataccaaatccaacttcttttataatgactggaacagacactcgtgatacaatcgacgctatattatctaaccaagtcacaaattcacgattcccttcaggcataactaattcttgaggagaattaacatggatttgtaacgcttgtgcctcaagtaattcaactgcttccaaagccttttctactggtacgtccgcaccaacattgctaaaaatcatgccttcaggattcatttttcgcgcaatcgtaaacgtctcagccatgcgtggatttctcaatgccgcatgtgttgatccaactgccatcgctaagccagtttctcttgcaactacagctagcttttcattgatgtttttcgtccactcgctaccacccgtcattgcattaatataaaccggatatgccatcgttaagtcaggcgtctgtgatgtcaaatcgatatcatttacattaattgatgggatagaatgatgcacaaaacgcatcttatcaaaatctgaatgcattgcgtcagattgggccattgctatttcaacatgttcattttttctctgttctctttgaaaatcactcatgattaaacctaccttttcgtcatttctaatttaaaaccattttttacgtctgaaaaagatgattaatacgacagctataacaaacattacagctaagcaaatataatatccataatgtaaatgtaatgccggcatatttacaaagttcataccataaatcccagctatgaatgttaacggtgaaaatataactgatactaatgtcagtacttgcataatactattcattctaaatgacgtgtatgactcaaaattttctcgtatttcgtttgtcatttcttgagcagtacgaatgatattacgttgcttaatcaagtggtcatcgatatgttgaatgtatagcgaatgtttattatctataatcaaatcaccattttgtttcattgtatcaattagctcttgcataggaaacagtacacgttttactttaatcaaatccgaacgtaacttaaagacactatccatgaccattttattaaagcgatcatctacatggcggtcttcaaaatgataaacactatcttcaagtgcatatacaaagttgaaatatttatcaaccatcatatctaaaattaatatgacgacatctgcacaatctaattctgcatctaatgtattcatatacttatagactactttatttaatgattccaacgtttgatgatgatatgttactaatacattgtcttgtataaaaatatttagtgctattggtgaatagtttgaccccataatactatggaatactaagtattgataatctttataagatttatatttagctcgtggcataccgttaattgcatcatccacttctaaatcattaaaattaaaatgtgctttaaaccattcattttcttgttcattcggttcatcaaaatcataccaaacaatagtcgcatcttttggtatctctttgatatcatcaactactttaaacggttcatatgtagtttgataccgtatctttaaagccatcgatactccccctaaataacgaattctctattattttatcatgaattaaataacgtgtatgtcttaatttattttagtatgatagtcactaaggagatggttattatcaaacaactttttacacatactcaaaccgtaacatctgaattcattgaccataacaatcatatgcatgatgcaaattataatatcatttttagtgacgtcgtgaatcgttttaattacagccacggtctttctttaaaagaacgcgaaaatttagcatatacgctatttacactagaagaacatacgacatacctctcagaattgtctcttggcgatgtatttactgttactttatatatttatgattacgattataagcggttgcatttatttttaacattaactaaagaagatggtacactagcatcaacaaatgaagtaatgatgatgggaattaatcagcacacacgtcgttctgatgcttttcctgaatcattttcaacacaaatagcacactattataaaaatcaatcaactatcacttggcctgaacaattaggacataaaatagcaattccacacaaaggagcattaaaatgacagatgcattacaacaaaagattcatatcgaattactagatttattagatgatgttaagtttgaattaacagaattaaatgcacaaaaagggttatacattaacggaccagcaaatcagctacttaagcgtggcgtgcatatggcttatgttcaaggacaaaagcaagccatcgataatattatgactattgtggaacaacagcttgaagatcaacatttcctagaacattatgataaatttcaaaatgaggttgctcatcgcaattatgataaaacagctaactttgcagaacttagtgatattccacgtcaattcgataattttttagatcaattttatcaaattaaagggcaatactttatcatcacacatatcaatacacttattggtgattttcactcagaagctcattaacaattagtctatataacccttgctatattttcaaaaacaaaacccaattacgttttcatgtcaaatatcatcttgcatgaaatcgtaactgggtcatttatatgttattagttattttgtgttacatcctcatctatcgatttggcaatttgtttaatagctttatgtgattgtctaattggataaattggaaaatcatgtaccatcttaggataatcataaaactcaatgtattgatgatgttgcaacatcatttgttcaaatagcttcatatcaggatgtgtcatttcacgtccaccaccaaacatataaactggtggcaatccttctattgtgccattaattggcgatatgcgcttatctgttaatggtaggccattcgcccattttttcataatctcattgacaccaaactgacttagaaccgcatcttgttcgattaaggcgtccgaaatatctttattagatagtgttgcatctaaaattggtgagattaaatacaatttattcggtaatggctgttgattatctaaaagagattgtacaaaggataatgccagtgcaccacctgaaccatcacccatgactacgacattttgatgtcctacttcagatactaattgatcataaacacgttgtatcgcttggaaagtatcgtcaatatgaaactctggtgtctttggatagataggcagtacaacctcatataatgtacttaaagtgattttatccaacaatctccaatggaacggtgatggttgtagtgcattgaatccaccgtgaatatataaaattttcttatcaatttgatgtctgaaattaaagcgaaagacttgcatatcatctaatgacaatttttctaaatttgctttaacatttaatgttgaaggctgcttatgtttttttctattttcaatttctcttttataaaaaaatctttcaacatcttgatcatttttaaacataatcgagcgattgtgaagcaaatatttattgacaacgctattcataacacggtttctaatcaatgtcttaacctacctttatatattttatgtatccaatgattgtctatcccctacattctttgccaaaaaaagtatataatgtagaagatattttctttttcactttcaaatttaagactacaattgaacagtgatttttcatcattataacagacaactagacatattgataagtaaagaaaagaactttatacggaggtaccttgcatgacaaatccaaatcaacgattagaaccatttgatgagacatttcaacaaccgaatattcatcgtggtaagcgatatggtaagaaaaaacgttcattggtaagcatgattattcaaatcattgttgttatattaaccacaatcgctggatacagcatgtggaaacaacccatttttaatattgtcttcaccaaagaatctgtagattttgatggcattaaaaattttaacgagacaattggaaaaatgcatcaattaaatattaatttgggtaatatcaatgatttacaacaaggaatcgatcgcttaattttagtctttaacggtttctttattttatgtatcgttagcctagtcataacaatactgacaattgtatttaatcgcacagttctaaaagtagtaaatattttagtgttaacaattatgttagtcattacattgtatttcagttatattattaaagcactcgcacaagaaattgcagatgttttcaaaaaatattatttaaatgtaccaccagatcaagtgattacagaagctgacgctattcataacggcatcattttacttggctgtagcatcggtttacttgttataagcttattcttccgtaatcgcatgcctcgtttaaaataatgttatatagtagggattgggacagaaatgttattttcacaaaattcatttcgttgacccacttcctgctttttctttattaatgacctactacgtcaatgccaaattttaatataattcctctaacattctataaatcaacaaataaaaaaagtatcgataaccatatttggcaccgatactttaaaaatcatgtccccacaacataatttttgattagtcacacttcaattaatttattttatttattcatgattgatactattatctgcatctaacttttgagctgtagcttttgcttttttattactttgtaaaaataaacataaaattaaggcgatgatgctaaatatcgttgcaactataaatgcatcattaataccttcaaccgttgctagtttatttacaaattgtagtaacactttcattgcgccttcttgtccgccatattgtgatgctaattcacgcatatgatcttgtacaacaggattcgttttatctaactcttccccaaaagctgataagtgttgtgtagtttgtgttgtcattacagtaactaagattgctgtacctatagagcctgctaattgacgcatcgtatttaagaaagcattaccatgagaggcaagtcgtcccggtaacgcattaatagctgcagttaccattggcatcattataaatgccataccaaatgaacgaagtacatagatacccatgattgtcatatatggtgtatccatatttaatttagttaattcccatgttgcataagtcattacagcaataccaaagatagctaatggttttaaaccaatagtatctaacaatttacctgcaaatggtcctagtagacccataattagagaaccaggtaataataacaatccggaatctaatgctgagaatccgcgtaaattttgtaaataaatcggtaataaaatcataccaccatataaacttaacattacaaccatattaataattgttgttaatgtaaatgttgggaatttcaatacttctaaattcaacattggtgatttcattcttaattctctaataacgaatagaataataaagataataccaatcgcaaacattgtttctatctctactgaaccccaacctttgttgccagcttctgagaaaccatataacaaagcaccaaaaccaatcgtactaaaaatgatacctgggatatcagctttagggtttgttgtatattgatataacttaaaccatacaaaaccaattaaaatagcgataatcccgataatgaacataccgtaaaacatcacattccaatggtaattttgtacaatataacctgataatgttggaccaattgcaggtgctaaaatcattgcgatacccattgtacccatggcagcaccacgtttttcaggtggataaattgtaataataacaattgaacctaatggcattagtacacctgcaccaatggcttgtaatacacgtccaaccatcatgattgggaaattcattgaaatcgcacagattaatgaaccaattgtaaagagtactaacgcaactaaaaataattttcgatatgaatatttattaaatagatacgccgtaattggtattaaaataccgtttactaacatgaatcccgtcatcaaccattgccctgttgacgcagaaatattaaattccgtattaatttttggtaaagcaacatttaataatgtttggtttaaaatcgcaataaacataccgaataataatgccgctaatattttaccgcgtgaaacaccttcaccaaaaataaagtttttatgttctttttttattttttcattcactttatattcttctgattcaggatttttagcagcaactgcttcctcatccttattattagtgaatgcttcttgatctttctcagacccctttgtgtaaccatttagactaacttggctatgatcatcttgattgtcaacacgcaactcttcatgcgtcatacgttgtgtcgattgatcagttgttttgtctaaatcactagctttaaatttagattgatttgattgacgtgtcgtaaattgttgttccttttgttggcgtttgcctttttttcttgatcttattaaaaataaattgataaccccaacaataatgagcgctaaaataatgtagctaataatgaaggtcgtagtcatttaatgacccccttaatttttatggatttttacttcagcgttcattccaggaacaacttgtttagacggttctgattctagagtgattttaacaggtattacttgagaaactttagtgtagttaccatcactatttgatgatggcattaatgaaaagcttgcagcagttgcttttccaatactatcaactttacctttaatagaagctttttgaccgtcaatagtcacatcaacatctttacctacttcaacatctttaatatctttttcgtcaatatttgctgttacatataaatcatctaaattgtatgcataagcgattgggttaccagcttgcaccattgaaccttccataccatctaatttggcaattgtacctttttgaggcattttaagatccatatctttcgtttcgccatcttgaccttgtacagtaacaattgctactttgtcacctttatcgagtttgtcaccttgtttaacattaagtgatttaatttgtccagatgcaggacttgctattttaatttgatcgccatttacttttgcattatcagttgttacatagcttgttgttttattccaaaaataaaagccagcaatcccaattgctaacagtacaacaaccgtaatgacattaattaatatcatctttttcatgaaacatttcctcctatttgcttttaaaattcactttatttattatagagacatgataactaaaaaaacaccaacaatttttataagagtgttggttaaaattcacaaaggtgtaacaatatgaaacgacaagccaaaatagaaattcaaaacgcacttgttgatttgatggctgaatatccttttcaagaaatatccactaaaatgatttgcgcgtattgtaatattaatcgttctactttttatgattattacaaagataaatttgatttattggataccatcaactcaaagcataaggaaaaattccaatttcttctaagcgcgctacatcataatttcgaaaatattaaacaggataagcttaaactttataaattcttcattattattgctaagtatatcaagcacaatgagcagtttttcaaagacattttagttacctatccaatgaaaacattattcatagactatataaatttagcgagagattactatcaacaaattatgaatgactatagtactacagtaaccaataaacagctttatgttacatatatcataggcggtcaagctggggtgtttattaattggctttcgaatggttgtaatgaatcacctgaagaagttgctgacattttattggctaatacgattaaacttcaaaactaataatacggtttcattctaataaagaaatgctataaaacaactagataaagttaaaccaaatggatagataatagtacatatgtaacggtgctatcaatataaaaatgccgagatttccacataataatctcggcatttttatttttgatgctaaattcataggtctatgaatagctcaagttttgttttttaatttttcaattcaatataatagaagaaactatgtttatcatcgatttgttttaaataccttcatattataaatctgtaaaataattaatataactgctgtagctataataataattatgtaaggtataggattatcttcaccttttacccccactaatggcgatgcaacaccaccaaataaaaactgtactaaacctaataaacttgatgaactccctctaccactactactttcatccatagctattgtaaaaccaagtgtcgcaacacctgtcactggtgctattaaaatgataaatcctatcgctaaaaccaaaagttccaatgattaagcaatacaatcgtcactaaaattacaccgataatctgaatcatcgtcatgcctctcatcaatttttgtgagtctataaaatcaacaaggtacccagtaagttgacttgatataatgagcgtaataccaattcctgcaaacatccaactaaattgtattgcagtcatgccataaattttttgaataataaacggagacgcagaaatataagtaaataatattacaaatgtcataccttgaatgagcattggtaatacaaaacgtggcgtcttcaataatattttgaagtttttaaacattgtctttaatccactacttgactcacgatttgtcactgttaatgattcaggtacttttaataaagaacctatgaccatgacgaagccaaagatagtcagaatgacaaagaccatacgccagacagaataatttaaaattatgccccctattgttggcgcaacaactggtgcaataccattaacaagcatcaataatgccataaacttagttagttcattaccactatacatatcacttgctatagctcttgaaataactgctgctgcgccacctgtcactccttgaagaaatcttaatgcaaccatcagccaaatattatgtacaaaaacaatacctaaacttgctaatgtaaaaataatcatagctataataagcggctttctgcgcccagttgaatctgaaattggaccagcaaacaaattaccaaacgctaaaccaatcataaacatcgataatgttaattgtgcgttagacgtcgttgtttgaaaatcatgtctaatatctggtaatccaggcaaaaacatatctatcgataatgctccaatggccgtcaaagatcctaaaataataataaatatcggtgaacgcttgttaaaatgcgttaaatcattcatatgactatctcctttatataatgattagtttataactatcacgaacagaaactaaatttaaatatgctcttttatatattagcattagtcacaagtttcatgaacatcattacaacttataaaaggtataaaatgatataaacctcagcacttcataaatttttccacaaaaaacaatcccttcaaagtaattcacactaattgtaaatactttgaaaggatgttgtttgtattccatgacacatgcatcttatttaagttttatactctatttttctgatgtcttgattaattgcaagcggtcttgcgagccttgttcaagctcatattctttatctacttgcttaccgttttcatttattaatcttacggttgcggtaatcttatcaccatgtttttcagcatctataatttgtggtgaactaatcatcattaaacttcctttagatacacgcttctttacatcatcataaaaagatgatcctttttttatatatgatgatacaaaatcaaaatccgactgattaaacgcagcattattcgctaaagaatatccagcaaagaattctatcaatttgttcttcaagctgttttcttctttttctttcttttcaacatagtcttcgatatcttcactgtcaaaattcaaagttatctctgtattgtattttaaatcgctagctttaatcgtcttcgtctgtgttgtaaatgttttatctttcgctttacctgaagctgaaatggtaatatctttattttgtggatatggaccatacgttttggaacttgaaaatgccatttcatggtcatttatagttacttttttagaactatcatttaattttgtatcgccttttaaagttacagatatatttgcttcttcaaaatcttcagtaacatctaccgtttcagaattactttgtctaaaatcaaattttaaatggcctgcaaaatcaccgttctcagttgatttcatagctggaattctatatgtccccggtataaaattacctattggcgtcactttatttgcttcagctataaccatctttttcttaccaccagatttaaactcatattttgttttttctttcggtttaacaattggttgcttggtaggtgcagtaaagctcatattatcgaaaaagatataacgtgtgccatttttacttacacgtaatatattttgaccagatctggtttgaatataagaagctacgctggtcttactcttattcaatttatgtaccgtatttttaaggtcgctgacaaattgcttaagcccaacttcatctttgatatagttaatgtatacttttgcttcttcagaatctactttattatctttagtacttaataatgttgctactttttgtttatcattattctcaatcgcattcactaatattttagtttgcgcttcaggtgaattgaagtttcttagtaaaaagaacaatataataattaagattaaaatgaaaaaaccaattgcccaaggcaccatttttctcatcttgatgttattagtttgtatatcttcatcggttgactttctatataatgcttgacgactatcaaatttatgtccacattgtgtacatatctgtacatcatcttgtgcttgttgtccgcacttcgggcaagatttcatactttcacctcaattctgttcctcttcaattgttatatgtatatcacaaaaattatttcattattttaccattattattttacaaatattatcccaagaatacaattcaagaaatgattaactttactttagaattgtaccttattacattatttatgaaagtactctctcaattataactaaaaagaaggtgttcaatacatacatatttagtcttatatttgaacaccttcaaaaacctatttatgattgctatatgttttaatgcgatgattgatgacttctaatacttgccttacattttcaatatcttcagaatttaaatcattagtaatatcttgcgcaatatctgtcataatcgcattacgttctttcaaatatgctctacctttgtcagttaaggttatgaatttcaaacgttgatcaatatttaaatttggtttatctaacttaactaattaagcatcgattaactttttaattcgtcggcttactgcggccttatttacaccttgtctttgcgtgatttcactaattgtcaaaggttctttatttaacatacctaatacgttagactgctctaatgaaatttcatattcattttgtaaatctttcaacatttttgcagttaatgcgttaacgttatttataaactgctctaaaaattgaatatggtcttgtaaatgttttaccataattatttctccctaattactatttttataaagtatcctcagcaatcattgtatcgcacatctaaaaaacacaaaaatattgacccatatataatataacaaattaagatttacatgttgctgctttctccttgctttaataaattaaatcatctacatttatatttaatatttattataagcgaggtgtcagtatgttattgaatttattattaatatttatacttatcgttatttgtccgttaattttcaactatactctgacgttaaatttaacatgctacatcttagttgtcatatcgatatttttgtcactcatctatagcatcatgacctatactttcccttggtctatgtttgtaacatttataataatcagtattatcatgctattcaaacatagatatttattttctcatacttctagtcgcttatttattaaaaaattattatctttttcatataaatttgtactctacacatcagcacttctatttataagtacgattcagtcacctattgtgaaaggtttgtctatgtggttagctatattatgtctttccctgttactaacctttatttgttatctcgtttggacagtatcatatagacatagatcatacaacaaagaagttgatatcataattgtgttaggtgctggtatttttaccgaatttgtcacaccaatgcttgcagcgcgtttagatcgtgcacttgatatctatcaacaacaagcatcagcaacaaagatcattgtatctggcggacaaggaccagacgaaccaatttctgaagctttagctatgcaacgttatttgattgcacatggtgttgataaaacagatatactaatggaatctcactctataaatacatacacaaactttttatattctaaacaaatcatcaacaatttgtatcatgaagcagttaaaattgtttgtgtaacaagtcagtttcatgtattgcgcgccttacgactagcccaaaaattaggtttatctatcgatggtgtcggaagtcatacaccatatcactttttcttacatgtgctcatcaaagattatctaggcgtaatgtatcagtatagattgttattaacgttatattgttcaagtagttggtttatatgtctttacgccgcttttatttataatagttaatccacaaacaaactattattataggttgtttctaatattgcgtcaaactatctttaaatattcgttaatccttgattagacaattgttatattgaaaataaataaactaaagagtctgggacattaatccctaaaaaaaacagcagtaaaataattttcaattagaaaatatcttactgctgttctctatttatacaatacttcgtattgaatggcttcgctatgcccatctggcacattactgtaaaattctataaatagaatttttgatgacgggtcccttcctagggtgccgtctcagccaccccaaccggcacattgttgtaagctgactatatgtcagcttctgtgttggggcccctgtcttcgactggcactgctccctcaggagtctcgccattaatactacgtattaacatgtaattttacttttaaatactttaaaaaaataagacactttggccaacttaagccaggatacaatttacaaatagcgacaaattctcaatttgttttatcctatgacctatttcaaaacccaacagatactagaactttaattccatttttaacaatgattcaaaataccttcggttatttaccggagtatattgtagctgatgcatgttatgatagtgagcaaaactatatggctattatagatgattttaataaaacgccacttattacgtatgtcatgtttattaaagataaaactagaaagtttaaaagtgacatttttaacactcaaaattggaaatatgacgaacttaatgatgaatttatatgtcctaataacaaaagaataggttttaaaagatatgcataccataatgatagatatggttttaaacgtgacttcaagctatatgaatgcaacgagctgtacattataaaatacatatcaaaaaagctgatttctatcaaataattaatagaaatcagcttttttacattgcctaagaacttaatgtcccagcctgttttttgtaaacccaaatcgtattctgttatctaacttttatactactatgtcttaaatcattaacatttagcgtctttacaagccactaatcagttattttgccatcttctaattcaatcactcgatctgcatattcaaataatcttcgatcgtgtgtaatcataataccaatcatttgttgttctttaatttgttgacgtatcatctcaacaacttttgttgctctatcggcatctaaacttgctgtgggctcatctgctaaaatgattttcggattattcataaatgctctcataatcgcaacacgttgcttttcaccgccagataactgatgcggatatacattcaagcgatcttctaaaccaatatttttcaaaagttgtattgctcttgttgaactttgttgtttggtcattcccgcttcttgacctacgagtgtcaattgctctatcacttttaaataaggaactaaatgtgaagattgaaaaataaaaccaatatcttccaatcgtaaatcactaggacgatgctgtttatcaaacaatggcgcatcattgtaaagcactgtaccactcgtttgacttaacaatccgcctaatatcgttagcaatgttgttttcccagaaccagaggcaccatttaaaatgacaaattccccttgttccacttcaaaattaataccttttaaaacttttgtttcagacaaaccttctccgaaatttttgacgatatcttcaacgactaatgccattattctgcacctccaattgcttcgataggatccactttaaataatttgataaatgatagtgaggcacctaaaatcgctactaatataaatatccccaccattaataaaatattttgcgttgttaagtaaaaaggcatcgttaccggcatcataaatgatagtcctactatgatgatcacagcaatacctaccccaattattgttagtgttaaaatttgtaaaactaacgcactcaataaatgtcttgtcttaataccaattgctttcaaaatgccaatttgtgatattttttgaatcgtcataacatagaaaaatgcacttagaacgattgctgtaatagcaaacaaactaacaatcatcatatttaacggtgcttgctctgcttgataactcgcaatattacctgttaaatctttttcactcacaacttgaacgtcatttattttattaagctcatcacgttgttgttgtgttaaatttttcactggataaaatgccgtattaaccttattcaatgcattaaatccgttatcgttcaatagcacaatggaactatgcgcatacattgtgtcgtttaaaataccagaaactctataactagttgaattatttttaaaatgtaatctatccccgactctaatgttgtctgcagctaacttatcattaatagcgacctcatgagcatttttaggataatcaccttttttaagttgtatgcgttgttgtttaacgtcattcattgtaatcacatcttgttctttattagataatttcaatgtttgaatattcattttatatggttcttgatgaattacctttttaatttgattctgttgcgtatcactaagttgcgatttctcaatttgcggctctttcattttttgaacaacatattcatcattatcaaagtgttcaaataacgaaatattctccctaccaagcccttgagctaaaccactaataaataacaccataatacttaataaaagaatgattaatgtgattaaaatataacgaaatttgtaaaacataatctcttttatcgctaatttcatatcgattcacttctccctatttcttctttagcgtcagtataaggttgaaatatgaactcaatatgaacaattgtttttttacgcaaaaatattttacatgtataataaatgaaaaagataagggagtttatagctatggtgcaatgtcttgttgtcgatgacgatcctcgaatcctaaattatatagctagccatttacaaacagagcacattgatgcatacacacaaccaagtggtgaagctgcattaaaacttttagaaaaacagcgtgtcgatattgcagtggtagatattatgatggatggtatggacggctttcaattatgtaatacattaaaaaatgattatgatataccagttattatgttaacagcgcgggatgcacttagtgacaaagagcgtgcgtttataagcggtactgacgattatgtaaccaaaccctttgaggttaaggaacttatttttagaattcgtgctgtattacgtcgatataatatcaattcaaattcagaaatgactattggcaacttaacgctaaaccaatcctatttggaactccaagtatctaataaaacgatgacgttaccgaacaaggaatttcaattattatttatgcttgcagcacgtcctaagcaaatctttactcgtgaacaaataatagaaaaaatttggggctatgattatgaaggagatgagcgaacagttgacgttcatattaagcgactacgccaaagattaaaaaaattaaatgccacacttacaattgaaacagtaagaggacaaggctataaggtggagaatcatgtttaaaacactctatgctagaattgcgatttattccattacggttattttatttagtgcattaataagttttgtattaacaaatgtttactatcattataatttaaaagcatctaatgacgcgaaaatcatgaagacgcttaaagaagcaagacaatatgaacaatcagctaaaccaacgcacattcaacaatatttcaaacatttagggcaaatgaattaccaaataatgaccattgatcaaaaaggtcataagacattttatggggagccatttagagaagatactttatcacaaaatgctattaacaacgtattaaataatcaagattaccatggtattaaagataaaccattcgcattattcgtaactggatttttcgacaatgtaacagataatactgttggtattaactttaagacaaaagacggttcaatagcagtatttatgcgtccagatattggagaaacatttagcgagtttagaacattcttagccgtcttgttaatgttgttattatttatctcgatttcattagttatcgcatcaacctattcaatcattcgtccagtaaaaaagttaaagctagcgaccgaacgcttaattgatggtgattttgaaacacctatcaaacaaacacgcaaagatgaaattggaacattacagtatcactttaataagatgagagagtcattgggacaagttgatcaaatgaggcagcattttgtacaaaatgtatctcatgaaatcaaaacaccattaacacatattcatcatttattaagcgagttacaacaaacttctgataaaacattaagacaacaatatataaatgatatctataccattacaacgcagctgagcggattaacaactgaattgttgctcttatccgaattagataatcaccaacatttattattcgatgataagattcaagtcaatcaactcattaaagatatcattcgacatgaacaatttgctgctgatgaaaagtcgttaatcattttagctgacctagaatcaatcaatttcctaggaaatcaacgtttgttacatcaagcattgagtaatttattaataaatgctattaagtatacagatgttggtggtgccattgacatcgctttgcaacatagtcacaacaatatcattttcacaataagtaatgatggttcaccaattagtccacaagctgaagcacgtttatttgaacgtttttataaagtgagcaaacatgataatagcaatggtttaggtcttgcaattacaaaatccatcattgaattgcatcatggtacaatccaattcacacaaagtaacgagtatgtaaccacctttactattacactgccaaataattcactttaatctctacctcctgaaaaaacatttctgtttttatttcaggaggtatcttttatattgattagcgctttctagccacttaacatttaatttctaccattcaacaaaatttaaatatatcgatggtcatttatggtttaataattttgaaggaggcattaacctatgatgaaactcaatttatttatcaatgcaaatgagacggaatcttatattgatatacatgcacctaaaatgaatgataacgttcaaagtattattaatgcagtcaatgatttagacaaatcacatacattagtcggatacatagacaaagaaatccatatcattaatgtatcagatgttataacattccaagttattaataaaaatgtaacagccattacaagcaatcaaaaattcaaactaaaattacgactttatgaactagaaaaacagttaccacaacatttcattcgcatttccaaatcagaaatcgtcaacaagtattacattgaaaaattattattagagccaaatggacttatacgtatgtatcttaaagatgcacactacacctattcttctagacgttatttaaaatctataaaggagcgcttatcaatatgaaaaatttgaaaaactcattatttattagcttaatcattggtttgtccctttcactgttctttagtatgttatttgcagacggcaaatattatccactgaacccacaatcaactattggcatattgtattatacgcatttcacagaaactaccgtaatgttgatttctatcattttatggttactcataggcgtcgtctttttccttggagattttatctttaaatacacagattggagcattactaaagcaactataatgcatttcataacaacgtatgtcggattcttgcctttagcaatgcttgccggttggtttccactaacagtgcattatctaatcatattcacaattatcttcattgtggtttatgtattaatttggataattcaattctttaaaaacaagaactacgtagacactattaacaagcaactgaaacaattaaaatgatttttattaaccactaaaaaacggtaatgtctatcacattaaaaaagacattaccgtttcgtttattatttaacttgtaaatacttagttacttcttcattaattttatgatataaatcctcatgatctgttaagcgataaccaaatgacggcaccatttctttaatctttggttcccatcctttgaattcatcacgatagcatctctgtaaaacatcaaacataatatctacagctgttgacgcaccaggtgatgcaccaagtaatgcagctaatgtgccatcatctgacgtaataacttcagtaccaaattgtaagttacctttagaatcctcagtatccttgattacttggacacgttgccctgctgtaatcacttcccaatcttcatttttagcatttgggaaaaagactcttaaatcatccatacgctcatcattagataacatcaattgtgacactaaatacttcgtaagactcatttctttgatacctgcagataacatcgtcacgatattatttggtttaaccgatttaattaaatccatatgtgaacctgtttttaaaaatttaggtgagaaacctgcaaatggaccaaataacaatgaacgcttgccgtctacaaaacgtgtatctaagtgcggcactgacattggtggcgcacccactgctgcttttccgtacactttagcatgatgacgatcaatcacttcttgatttgtacagcgcaggaataatccacttaccgggaaaccaccaatatgttttgattgtttaatcccagtcttttggagtaatggtaaactcgcaccgccagcaccaataaatacaaaatcagattcatatgttgtcgtttcattagtttctaaatctttaactttaactagccataccccagatttctgtttcttgatgtctaatacattctgcttatattgaattcccacaccacgttgctctaaattatcaaataactttgcagttaacgcaccaaagttaacatctgtaccagtttcatcataagttaaagcaattggttcatcagacttacgaccttcaatcattaacggtacccaagatttcatttcttcttcatcttgcgataatttcattttttcgaataaaatacttttctttaacgttgcaacacgactttttataaaagctacattatcttcgccaatgacaaaactcatgtgtggcaccgcttgaataaagcgatctgggttatctaattgtcctgttttaactaaatatgcccaaaactgttttgaaatttggtactgctcatttatcttaattgctttactacaatcaactgtgccatccttaccttcttttgtatagttcaactcgcaaagtgctgaatgccctgtaccggcattattccatacatttgaactctcttcgccaggttgtgctaatttttcaaacactttaatatttttctcaggtgataattctttaagtaatgttcctaatgttgcactcataataccgccaccaattaagatgacatctgttttgctatgttgtgttgtcataacaaatacagtccccctttttaaaatgaataatggaacgttcgagaaatacgacatattaataccactttaaatcaataagtgtctcaataggttcccatggtgatgctctattactatctactatgtatattaatattttataataacgaaactactttaattatatactttatgtgcgatagcacaaagacaaaaccacaaaccttaacagctatcaaccaatttaatttgattgctgattactcactattcattttaacataaagcgctaccattattataatgtcaaacttctttcattaatgatccataaaaaaaagatgagatgttagaaaacatctcaccttctgtatatttatattttgaaatacgtttttttataataatgacaagatgaaagtccaaatacagatgaatattagtaaacatacactgtatttcaatgtcatttttaataattctgattccttaccaacttgttttactgctgcagttgcaattgcaattgattgtggtgaaatcaattttgccgctacaccaccaactgtattagcagatacaagaagtgaaccacttgttccaatttgttgtgcaacagaagcttgaattggtgcaaataatgagttgttatttacaactgatcctgtcataaacacacctatccaacctaaaattggtgatagaactgggaagacattacctgctttagcaataccttgacccattgctgcacttaaaccaccataagttgtgattttagaaattgctaagatgaaacaaattgtaagaactggtaaccacaactctttaaatgtaacgccgaataatctacctgcatctttaaagttaacctttttagacattaaaattgtaataataatagttaataaaatagctgtacctgtttgtccaataatatttaaagtcaatactaatggtttatgcgtaacttcgctgattgttccaggtaagttgaatttaaatactaatgatgataaagcaccatttggtaagaataagtttttaaagaatggcgcactccaaatcattacaatgactgttaatacaatgaatgggctccatgcatgtaatactgcttttgcagaatgtgcttttgcaggttcaatttcttcatctttattaacacgataaatgtgttttggttggaattttttagaaaatactgctaatgctaacattgttaataacggtggaataatatctgctaattcaggtccactgaatacagttaataatccttgagtaagtgtataagtgattgaaactactaaaattgctggtaatgtttctttaacacctctaaaaccatcaataataaagataagtaagaatggaataatgaaatttatgattgccaatgttaaagttgctgattgagaaacacctaatactgaaacatctccaggtaatttcaacgtttctacaacacctacagggataccaatcgcaccaaaagcaccagacgctgcatttgcgactaaacataacatcgcagcttttaatggattaaatcctaattgtgttaataaaagtgcacaaattgcaattggtacaccaaatcctgctgcaccttctaaaaatgcgttgaatgcaaatccaataagtaaaacttgaatacgttggtcttgtgaaatatttgtaatactatcttgaattgttaaaaattgtccagattcaacagtaattttgtataacaatactgccatcataacgatatagccaatcggaatgataccttggaagaaaccttcgactactgcaccagaagcgataccaactggcaatttgaaaaatggtattgcaattagtaatgttacaacaagtgttgtaatagctgcataaatacctttcattttaaaaacagttaaacatagtaaaaacagtacaatcggtattgctgcaattaaagacgataataataaattatcaaatgggttaaacgtatttactaacataggctgactcttctttccataaagtagtagtgtaattgcttcattaaaatcatgctctggctatagcattttgttatcgataacattttacagaacagtgagattaatgtgatttttttcacaattaaaatataccattttttcagactattaacaatatcactttcctatttaattgttttatttttcattttaaatctgttcatcaaaatgaattgtacttaatgtaatgaagtaacttatactattcatgaattttacataagaccgtgctaaaataaggaagatactacgatgaggaatggaagttatagcaatgattaaacagataaatgtttctaatatgcaaaagtttgaatctcaattaatgaaagctcagtctgaaggttatacacatgtcgttccatatgccaatgagataatgatttatcaatcgatgttagatgcggttcaattatatcctaagtctatcgtggttgattatactgtggatggacaatacaaaaatgattgtcactatttcggtcaatcatcgatcaacattgccgattgggctcaaaacaataattattatcctaacctgatatatgcgattcaacagactcttgatttaatacattattactctgtagaaacgattttcgatttagctttattgacacttctgaaaggtgatttatcaatcgatggtcatgtcgtttttgattttaaagcccctatagcaacaagtgcttcaatatgggaaactattaaaactattgaagattttgatatgatgtctcagttttatttgaataaaatggcttatattgatcatcatcctataccttttcgcaacctttttatcgaggattcagaacaacttaattcgccagataattggttgtattctaccaagtttatgctacctaaatggttatataaaatagcaaagcaacgtgctgataacaaacaattacaaaacttcggcctgtatacgaagcaaccaaacgttttaaaagatcacatcgtttttatcggtgatcatcatcaatatataggtaattcaaaatatttatttacttacttcgttaaacataatccaatgactgcctgttattttgttactgacgatcgtcgcggaccacatttcatatcacctaagtctgaaaaagctgacgaattgattaacagcgcacgcgtagttatagttgaaaatgatatacctgaaacgttacaaccaaacggtactttaattcaattacatcaaggcacaccaataatgcaattatttttagatagtaaagagcctattaaaaatatagaaacacctttttatcgtgctaaaaggtataatcgctggttgcaattcgattatgttatacattctgctgatgatattagccacttttatcaaacggcttttcctagtcaccaagcaaatgtattggcttatggtaatcctaaacaccaatatttactacaaaagagtaacgaaagtactactcaacaacagtataagaaatcgtttaaaataaatgatcaaaaaccagttttattatacgcacctattggattagtgagtgcgcaacaattaccactatcagatgctttattcaaagcctatcatgttgtggttcagggtgttgatgaagcgatcttaccagaagaggcgcttgttgcaccaaagtatcttagtgctcaagacttaattctaatgtctgatgtcgttatcactgattactcaaatataatatttgatgcgatggctatagacaaaacagtagcattatacactccaaatcacagtcaatacattgagtctcaaggtgttaacgaagatatttggcgtcatctatcaaaaatttggtatacagaccgacaattattaattaataatttaatttcccaggcaataccagtgattaaatatccacaaatacaacataaagaacaaccattagaatctatttcacaacttatattgtctaagatgacatctaatcaatagtgtttaaatttctcagtggctgtgaatgaggtttaaaagtactataaaacgtaaactttgatactttaaaatacgcaaaaaacggtaaaccctaattcatattatagagtttaccgttttattttttaacttgcatcatagttatattaacattattgttggtagtttggatcagtaaccattgcttgtccagtataatcaaccgttacaattgaatattttccatttgcatttgggtctttaaaactaaacacatacttatagttgccattatgttcttcaatagaataatcattatacactttattattactaccaaatttatttgcttcattattagccgcatttaaagctgtttggaaatttggcaattgctgtaaagcttgatttttatttccattaaacggataaatttgacgtgcaaccggcgcggcattttgtccataatatggtgcaacgtaacttgatttttgattattattcgcttggttattacttgattggttattatttgtttggttttggtcattgtttgttgcatttgaattagattgttgctggttatcgtttgcactattatctttattatctttgtttacgtctttactatcatctttattatctttcttatctttagatgaatcatttgtttttttatcttgttgttcagttttcgctttatcatctttttctttattaccgtctttttgttggtcactatcttgaccacatgcagctaaaaataatgataatgctagtaaccctgtaactaatcttttcatacatatctcctcctataattcgatattcattgaataatcttgaaatacatatctaccatgtgtatcttttcatggcttgttaccaaagacgtcaacattaatatgatctgaattatcacaatatccataactacaatctaaggttctttttattataccctaatttttgttcattattatttaatttttgtgaattttatgttttctataaatttaattattttactttaacaattcattacgcatttagcatttcaaggtatacacaatatttattactatgatttcattttatctgctgcaaaaacaatcattataactctttttccataattaaatctgtatccgttacatcacctgtttgaaaatgatgttcaccaaccactttaaatccatgacgtttataaaatgcttgagcacgaggattatgctcccaaactcctagccaaattttatgtttattatgttcttgagcaattttttcggccaattctatcaattgtgaacctcttccgccaccttgaaagtctttcaaaaaatatatgcgctgcacttctaaataggtctcccccatttcttcagtttgagcactattaatattcatctttatataaccaacattcgcaccatcttcttgataaaaataatgaaatgaatctacatggttaatctcttgtgtaaatttctctacagtataattgtctttaaaaaattgatcaaaatctttgtcatcatagtaagaaccaaacgtgtcataaaatgttctagttgctaattcaactaattcactagcattttgttctgaaatttctttgattatcccagccatataaatcctccaataaacagtgatcgaatcaaaatattacttatgttatttttcagccaaaactatttaaaaatacattaacacaaatcaattacaaattgtattgattgtgtgtaacatcaataaatgatacatttattccagtaaaatggccgtattttcaaaagagaaaaagagaggatgtatcgttgtgatagaaacatttaaagcgtttgtaattgataaagatgagagtggtaaagtgacaccaactttcaaacaattatcgcctactgatttacctaaaggagatgtgctgattaaagtacattactctggtataaattataaagatgctttagcgactcaagatcataatgcagtcgtaaaatcgtatcctatgattccaggaatagatttagctggaacaattgttgaatccgaagcaccaggctttgaaaaaggagaacaagtaattgtaacgagttatgacctaggtgtcagccattatggcggttttagtgaatatgcgcgtgtaaaatcagaatggattatcaagcttcctgatactttaacattagaagaatcaatgatatatggcacagctggttatactgccggtttagcaattgaaagacttgaaaaagttggaatgaatattgaagatggtcctgtactcgttcgcggtgcttcaggtggtgtcggtactttagcagtactcatgcttaatgaacttggttataaagttatcgcaagtacaggtaaacaagatgttagcgatcaattacttgaacttggtgccaaagaagttatcgatcgacttcctgttgaagatgatcataaaaagccactcgcatcatcaacttggcaagcttgtgtagaccctgttggtggcgaaggtattaattatgttacaaagcgtttaaatcatagtgggtcaattacagttattggtatgactgccggtaatacttatactaattctgtattccctcacattttaagaggtgtaaacattttaggaattgactcggtatttactgctatgaaattaagacagcgcgtttggcgtcgtctcgcaaaagatttaatgcctgaaaatttacatgagatcaagcaagttattacatttgatgaacttccagaacaacttaacaaagtaattaaacatgaaaataaagggcgcattgttatcgatttcggtgtagataaatagtattcatgaaaaagacatcccgttatgcgagatgtcttttttaatttagtatttgatatacataccgcctgaatctggttcggtaggtataaatccaaattttgtatataatttatccgctgggtagtctgcaatcagactaacgtatgtactctcaacagccacacctttaatatattgcataatatgctccataattagactgccgtaaccttgaccttggtaacttttcaaaactgcaatatcaacaatttgaaaaacagttccgccatcgccaatcactctacccataccaattaaccgatctttatcatacaaggttactgtaaataaggcattaggtaatcctttttcagctgcttcgcgcgtctttggactcatacctgcgttaatccttaatgcgcaataatcctcgcaagtcggaatatcatatgtcactttaaccattatttaccccacttttcatcacacaatatatcaacctagtataaatgtttatttacaatagtcttattcgcttctttaaacacttcatgatgacttgaaacataaccctctgcattcgcatctggttggatatatgttttagcaaggttcgctgcatttgcaccatcactaaatgcacttgcaattagatgtgattttgcatcatgataaacaatatctccacacgcatagataccaggtatactagttgtcgtattaccaaatcctttaacacgacaatcatcatgcatatctagctttgaagatgtttcactcaataatgtattacaacgatcaaacccatgactaataatgacatcgtcaaatttaactgtatgcctatcgccactttcaacatgttccaaaacaacttcacttatatgcgtttcatcatcattgccgaccaagtatttaatacgtgtttttgggcatagtttcacatttaaatctgtcaccaacgttttcatcgcttcatgaccacttacatcttcttttcgataaacaactgtcacgcttttagcaatcttggcaatatcatgcgcccaatctaatgctgtatttcctccacctgatattaatacatctttatctttgaaacgtctgtaactttgtacaacataatgtaaattagttaattgatatctctctacacctttaacatctaattgttttggattaataatacccgcaccaattgcaatgataactgctttcgatgtatatatttctcccgcttctgtttcaacttcgaaatgacgttctgcctttttcctaatatctaccacacgttcattcaaatgaacttccggtttaaaatataatccttgcttaattgtatcttttaaaatttcatgacaaggttttggcgcaatgccgccaatatcccaaataattttttcagggtaaattctcatcttaccccctaattcagattgaacatctatcaatcttacagacatatctcgcaatccagcataaaagcttgcatacaaaccagacggaccgccaccaatgattgtaacatctttcattatgtgcctcctatgactctctatattcatttctttcattaacgtgctcaaattgataattattatcatttaaagccattatactattaatatttatattgttaaaataaatcgcatagttagccatgaattatcaataactatcccatcacaatataaaaacacacctttcaaagtaagaaacaacaatgttcctttgaaagatgtgtatattttttagttctagttatattattttttaaaagactcatcacgtggttctttaagaattgcttgtcttaaaaggaaaaatagcaacaataaacctgcaagcatacctgtgtgcccaatacctgcaaagcctgcaaatgcttctggagagtatgatttaccagtgacttggaagaatccttttgtcaccatcatacctatagtaacgataacacctatgttatatacatagaagaaccagttaaataagtagtaacttgataatttaaataacttctccaatggtaataatattaaaaacataaacatacctaaaataagtgtatgtgtgtgtacaagtgataattgtgttgtaccagtaaaatcatatgcttttgttagctctctatagaaaaagccactaaataaacctatgatcatataaaaaagaaatgaatataataacctacgcattttgaatcctccctcaccttttcattatatccgattatacctattataacagtgacaaaaaagcgaagatatgacacaactgaatttggtttagcacatagtatgacagctaaaataactttacatcaagcgctatacaaataaaatagctataccatgacgctcgctacaaacgtcttgtatagctattatttctatttattaaattatgacggcacttcagtacgttttgtgctatgttttctaacaatagctgaaactaaacttgatacagcgccaaaaatcataaaccctataaacatccacattgtactatttaattcaatatgatgattcaagtataatagttctcttacacttgttgcatagtgtgtgaatggattccaatcatatacatatttttgataactttcaggcaacatttgtttaggtaacgttacaagttgcatactaaagaacattaaaatgaagaaaattggaactgacttcatacctagccataccataacacctaaaataaggcccacgaaaccaagaatcgcaaatgctacaaaaattgcgatacgatttggatggtcaaaatcaaatctttgaacgccttgcatgaaataaatataaacaaagctacctgcaaatgctgcaacaactgcaaatatcatctgtccaattgaagcaatgatacgatgttgcacgacgatattgttactagttctaaatgcaaagaacaataagatagacgttacgattgaacctatccaaattggcataaacattaggaatggtgcattaccacctgcttggtgatctttaactttattaagtttttcattatccacttttactggattcgtcaaaccattgatgtccgcggcattgactttaacattttgactcgttaatgtttccaaactttgcttcgtaatttgagcattaatattatcacccataccagttaacacagctgatgcaatttgtgaaccttgtaagcttgatccttcacttacaatcgttttaaatttagcctgcttaacctctacttgttgattccccattttttgtttcatttgttgaaccacttgtggcggaatttcacctgaagcaactttttgttgcatttcttcttttttactatccataactactttttgtgttttactcatagcatcttttgaaaagtctttatcaataatagctactccaaagattttttgatctttcaaatctttttcaaggtctttttcactatcaaccttaacccatttaattttattagaatcactatctaataatttatcctctaattttttaccaatgttaacatttttatcttgaatcgttgtacctttatcctcgtttaatataccaattggtaaatcttttggtttaggattatatgcaggataaaaagctaaagaaaagattaccaagataatcatagttgctattggtgcaatccataataatttatttttaaatatattcattttattaattacctccttattagacaatgtgttgaatatttcgcatgttgtctattataatatgtaagtgggaataaacaatacacaatgttcatcaatacgttcattaatagacaaatacacccacattgttcaataacacaaggaggttgatttatttttgaaagaagataggcgaattagaaagacaaagtcctccattaaacaagcgttcactaaattactacaagaaaaagatttagaaaagattaccattcgcgacataacaacacgcgctgatatcaatagagggacattttacttacattacgaggataaatatatgttactcgcagatatggaagatgagtatatttcagaactaacgacatatactcaatttgatttgttacgcggttcttcaattgaagacattgcgaatacttttgtaaataatatactcaaaaatattttccaacatattcatgataatttagagttttatcatactattttacaattggaacgcacgagtcaattagaattgaaaatcaacgaacatattaaaaataatatgcaacgttacattagtatcaatcattctatcggaggcgttccagagatgtatttttacagttacgtttccggagcaacaatttcaattattaaatactgggtaatggacaaacagcccatttcagttgatgaattagctaaacatgtgcataatattatttttaatggtccattaagaataatggcagaaaaccgtttgcataaatcaaaccttgattcactaacttaagtaatactcgcttttcctaaatcctttagaaaggaactatatatcatgattacttcattcagacattctgaagatatagataaacatattataaaaacaccattagatcatacagcgtcatggattaatgtagtagaaccagaccgagaagaaattgaaaatcttatggaacaatataatatacctgaagactttatacgtgaccctttggactcagaagaaagttcccgtattgaatatgacgaagatactggttactcattaatcattattgatttacctatcgtcaattcaactaatcgtagcgttctatcttttgtaacgattccattaggcattattattggcaacggtattatcgtaacagtttgtgacgctgaaaatgaatttttagaaaatttacctaagcgtgatattaatttaaaatttcacagcagatttgcattagaaattttaactactattgccgaccattataatcgtaacttacgattacttaataaaagtagaattcgtattgagaaagaactaaaaaataacattactaacaaacaacttttcaaattaatggaagttgaaaaaagtttagtatactttttagctgccttaaaaggtaacgatacaattattaaaaagttattccgtttacctgcaattaaacgttttgaagaagatgaagaattactagaagatttaatcattgaaaataaccaagccatcgaaacaacagaattacatcaacgtatcttagaaagtatcacaacatcatacgcttccttattatctaatgatatgaatacgattatgaagacattaacacttttcacggtactattaacgttaccaacactcgtatttagtttcttcggtatgaatgtgccgttgccaattgatgaccatagttatatatcttggattattgtggtaggtatttcattaattcttgtcgtaattgttagtattttcttatggcgtaaacagaaattataactaaattaaaaggtatgacagcttaaagtttcatcctattgcatttgcaatgactgatactttgattactgtcatacctctttttttattctacaacttctttatttgcttttcttttagataaaattaaagtaactgttatagcaatgatgaatgatattgtcataccaacaaagtagtgtaaccatcctgcatgtactggattgattgaaataaatcctggcaatccagcagttcctaatgcgattgctttaaccttgaagaaagcaatatatgctgaaccaatacctgatccaacgatagcgccaataaatggatatcttagttttaagttaacaccaaacatagccggttctgtaataccaagtaatgctgaaatacctgcggcagatgccacaccttttaacttcttattttgtttaataataaagaacgctgcaattgctgcaccaccttgtgcaacattagacattgtcgcaatcgggaatataaatgatccacccgttttagtggcatctgcaattaatgtcgtttctacagctataaagctatgatgcatacctgtaataacaatcggagcatacaataatccgaatattaatccaccaattgcaccaccaaattcataaagccatgttaaaccatctgataaccagtaacctaattgtcgagtgattggacctacaaatgaaaatgttagaaatgctgttataaaaatagataacaatggtgttaacaaattatctaacaccgttggaataactttgcgtaaccctttttcaattgaggctaagatataagctgctacaagcataggtaacacttgtccttgataacctacttgattaatatgcaaaccaaaaacatcccaatatggaatagccttacctgcttcaactgcttttgggaaatcgtatgcgctcattagcgatggatgaactagtatcatacctaatgcagcacctaaaaatggattgccaccaaagcgttttgctgcactaaatccaattaaaattggtaataatgtaaatggtgcattcgcaaaaacatttatcatttcagctaatccagcaaattgactatatacatctatcaatgatttacctgaaaagaataaatctttcgcagtcaaaatgttatttaaccccattaataaaccaccagcaacgatggctggtataatcggaacaaagatatctgaaagcatttttacaaatcgctgtaacggattcatatttttagcagattgtgctttgacttccgaagtggttgatgcttcttttccagttaatttttccagttcactaaatactttattcccctgtaccagacccaataataatttggtattgtcccccagtagaaaacgtccctttaactacatccatattgtttagcgcctcctcatttactaaactttcatcatttaaaactaatcgtagtctcgttgcacaatgcgccattgcatctaaattctcttctccgcctatcgcgttcaaaatttcttctgcggattgcttataattcatatatttagcctcctaattagacccggttcccatttattccactttattgtacccggttccaaaaatatttgcaacactctattatcattttatataaacacctacaccatttttgatagcgcattcatttttattgctatactacatgcatgtatattaacattaattatcggaggtaattttatgaaagaacgtggctatatcgaacagctttggcgtgaggaaaaatatcatgtattgttacacagtcaacagtctcaccaaatgattaggaatgctttaaaaacggatttatcacttcatcaagttcaacaaatgattgatgttgctttgttaattgaaccgagtataggaagtgtatgtaatgcttttgatcatatgtggggatatttaaaaaaatgtgcgaatgaagaagaaagacaacaatcaaaactacttaaagctgattttattaatggtaaaatcgacacccaaactttattagattttttagcagaacttgctaataaatatgatgttcaatatttactacaaagtcgtgttttaaacacaaaaagaaagagatagattgaaactttagttgtaacggacaaatagtagtcattggagttcagcaattcatactttgtactaaagtttactataatctatctctcaaggtttaaatgtacatatctatattaaaatgcgtttcatgatgttagaagataccatacacatttaattagttacagcataaatcaatttatacccttaattattacattgtttatattttaaattcgggggagtaattttaagtaatatcttgttgctgctaattctattgttaataaattgatattagatgtagaaattgagtgtgaaagttaataatagatgatttagctagtaacataattaattcatatatagtcaaaaagttctgttagatactgttcttgatgaatattctttgatgttaggtgttagctattctagatgagtttcttagatgtggatgcctgtcttgatgaagttatctatgatgttaatataatacttgatgttgattcttagatgttagtgcgatttcaagatgctgattctttgttgttgcactatcttggtgacgtttctagttgtttatagttatcgcatctcttgatgtaaaatctaagatgtttatgcatttctagatgttaattcttcgctgcttaagaattatcttgatggtaaatctagttgtgccatgcattttctcatgatgaatctaaggtgttaattcattgatgtgtgctgtttcttgttgcttcattatcttgatggtgaatttcgttgtctaatgcactttttcaaatgattattctaattgttacggcaataactagatggattttcttagatgttcacttttctagatgtttatacttatcttgatgttttctaaacagaacttttaaacgctttattttttagtagattgtttaaaatttcttagttgatggttattgttgttgatttgaataatttgtagcgaatattttgtaacagggctactaagaatttttataacaagaagtgatttcaatcgtactaattttcagcgtttgatgacaaaagtgtatgtccaaacttaaataatggcgataaaatttaagtcatgggtacatttaatgttttttgattcaaacttccattttggtcaatttgctttttttataacatagttgaatatcaataaaagattagcaagttagttcaaaatggctatgtattgttttttgaaatacataggtttgaaatctatattaattatgcaccaaataatttaattagactctatcgaaaatttccaaattttgcttactatctttctaattttacttttatattgtgcgcaatgcataaaaacaagcgttttcctaggagttttcattaatttcttttatttttcactattaccttttcaaaaatattcaactataataggtatactatccatgattttaaaaatttccatgttttacatttaaatgatagatttcaatatatattaggcaggagagagaaatatgacatgccaacttaaaatacatcatacattatcgacaataccaagtcgtaatattaataatattatggtgctattttcacttacaagtaaactcaatattacgattaatggtgaaaccaaagacgtaagtaattatattatcttaattaaccatggtgatatttataatattaaccacggcgaaaatataatcgaattaatgatacccgttttttatttttatcaacaagatgatgatttctttaatggttatttagatcgtcatttattacaatcaagtaattatattaagtcattaattgccgatttaatcagtacaccaacaagttcttctttaatggggaaaaatataggtcaaagtattatagacactttacttaaagaagcttttataagaatagatcatgaatatttaccaaatattgctttaagcaatccggtgttcatagactgtgtaaactatattcatgacaatattgatgcgcacttgtctttaaaagatatagcgatgcattgcaacatctctgaatcatattgttctaatctttttgttcgatatttgagtatgaattttaaagattattttacaagtattaaacttgttaacgccatcaatttattactttctacaaaacattctattacaactgtttctgaattggccggttttaacagtcatacaaattttgcaaatcaatttaagaattacttgcattttagtcctaaacagttccgttcactcgtttccaagattactgaaccaccacaaatacacttccaacaagataacgtatcacaattcactgagttaatttcaacaattgatttaacagctcaactggctacaaatacaacagatattcatatagatgattttaatccgaaagatcgaagtcagcgtgccaaagtatttgttcgatttagtaatttcaatgaactatttcaatttattttcaatgaatattacgatattaactttgagcacttaccaaaacctgtcgttttcattgacgatattcacgatattgagattagccaaacgaattacaacctgttaaatagatgttttgaaaagcttttcgaaaaaaatataggtttagcaatcgctattaaatcaacacaacaattcgaaacgatgaagcaattaatactaacatttttacaaggcaatcaagactataagacaagcaagaaattagttaaatttatgctcgtattttgctctaattctatgacagcagaagaaattcatttatgtcatcttaaaattaaaaacaaaaataaagaaattaaatatagtgtgacagtcgatggctttttagaaacttattcaaccgtggaacaagtttatgatgtcatgcagcgtcttaaattccattattactttattgatattgaaaattcaaaaactgcaacacatcttatcactaaaaaccaacactatcatcaaactgacactcattttgaacagtataagaaatttattttagattcaggtatatcatcaacacaatttgtatataataacctgtctgtaagcggatttaaatatactaatgatggtaagaatccaattcaattatctgacatagtgtatcacttaatcgcattattacgatatggcggtggcattagctatcaattattagatgaccattcaaattatatttccttgtacaacaaatatggtagccccctaccattaatgcatttatataaaatgtttagaccttttgttaatgaagatattgaaattacaaataattatgtattgagtcgtaaagataataactaccatttcttattattcaataaaattaatgatcgatatatgtcagacgtaaaacaagatttcattttccataatgaattacctcaagactctttgatgattattaaaacattgaatcatgaacatggttcaattcaacatttgcttccaataagcgatcaacttgtttatatagaaaaagaaattttagatgaattagacaaaacgaattaccctaaaacggagcttgcagttcaagaagaaactggtcgtacatttgaactcaagttaaatcacgacgaggttaaatatatttgctttaaaccaagctaaatactaacagtcctcttgtgtttagtttcttacgttaaaggctatttatatcataaggagatgatttgtaatgagtaactcacaagcaattcaagcaattgaaaacgtgttagtaacgtcaaaagttggtgtattatcaactgcatataataataaacctaatagtagatatatggtcttttataatgatggtcttactttatatactaaaacgaatatccattctgctaaggtcaaagaaattaaagataatccagcagcatatgttttgttaggctataacgacacaactaatcgtagtttcgttgagatggaagcgacaatcgaaatcgttacagaacaagaagtgattgattggctatgggaaacacaagacaaaagctttttcagttcaaaagaagacccagagttatgtgttttaagagtagttccgcaatccattaagctaatgaatgataaatcattagatacacctatcaaaatcgatttataacacaaagtgtatataggaaataacttttatgaattctagatataacaatgttaaatacttaaaataactcgctataattaaagtgtttaatatgtttacaattcaatttgcaatgtattgttttttagacacactttattcacatttaacgtgattagggtgtgtctttttaaattaattttatgtaatataaatactgcatttgcaaactgttgcacttttaggtataacagaattaactacatttaaggagattgatgaaccatgaaaaagaaaaaaggttttggtcttggtattagtttaatcgccatcatgttaattgtatgtattgtattagtaatcatgatgatgactggcggaaagaaagatacatactatggaattatgaaagataatactactattgaaaaaatgattagtgaaaaagatgaaagtattgaaaaaaatgttaaattaccttcagattcagatgttaaagttaaaaaaggtgattttgtaattgtttataaattagcagattcagataaaattgttaaagttaaaaaagttgaccatgacgatgtaccacatggtttaatgatgaaaattcatgacatgggcaaaatgcacatgaaacactaattgtaatttaaattacaaattttagttgccatcaaggtatatacgagtaaaagcagcggtaagttgatttccaatttggaatcattttactgctgctttttatatttgaaatactttcatattgaatagctccacttgccgttcgcctgcgctttgcgcatgcataaaagcccctaacaacctgaggtcactgcgctccggttcgcctgcgctttagcgcatgcataaaagcccctaacaacctgaggtcactacgcttcggttcgcctgcgctttagcgcatgcataaaagtccctaacaacctgaggtcactacgcttccgttcgcctgcgctttagcgcatgcataaaagcccctaacaaccaaaggttgtaaggggctttaaatgtcagatagtattttttaaattgattttaaatattcttgaccttttgctttgtcatatacgttttcccatttagctataacgattgttgataatgcattaccaataacgtttacacatgtacgtaccatatctaagatacggtcaacaccaataattaatgctaaaccttgtgccggtaagcccatggcacctaatgttgttaataaaacaacgattgaagttcctggtactgccgccatacctttagacgtaatcattaatgttaacatcaacacaatttgctctgataatgttaagtgcattccatacatctgtgcaacgaataatgctgcaatagattgataaagtgctgatccatctaagttaaacgtataaccaattggtataacaaaagaagtaatttcttttggagaaccgaagttttccattttcttcatcattacaggaagtacagcttccgaacttgatgtagaaaatgctaaaagcaattcacttttcaagattctaataatattcatgatattaataccacacatccatgcaactagtcctagtatagcgaatacaaagaacaccattgcaaagacaacaactaatactaattttaatagtggtaataatgcggatgcaccaaatgtaataattgtagtacaaatgaatgcaaacactccaagtggtgctaattttaaaattttattaatcatccagaacacagcttcaagcgatccgcttaaaaattctttaactggttctgcttttttacctacagcagctaatcctaatccaaagaatactgcgaagaagataataggtaataattcacccttatttaaagcttcaaaaaagtttgtcggaataatatgtacaatggtatcaataaaatgatttccatatgtagattgttctgctgcatgtgcagttgattgatatttagaaatatcacctttaggtaattttgttgggtctaatccagcacctggtttaaataggttaccgaagataatccctaaacctattgcgattgttgtaataatttcaaagtataaaattgttttccagccataacgccctacagttttcgattccccaacgttcgaaatagaaagcgctagtgagcaaaatacaactggtataacgatcattttaattaaatttaaaaatacgtcaccaaatggtttaatgtaatttgctacgttttcttgtccatataataaaagtcctacgacaacacctaacactaatgcaataacaacttgcataggtaggctaatttttctcttgaatagagccatagtacaaactccccttcatctgacatcactcaattatatcagaaaattgataattatctataaaaaattaaaatatttatcttttatagatgtcaaaaatcactaatttccatacaaaaactgtttacctcaaataattaaaattgaaggcactaaactgcttcaccagtttaacgtttcactattttgatggtttataattttgattgaaatatttatgctttgcagttttcaaacttttcttagtctctgtatcaaagccttcaacaaataatcctttattagtactgattggttgcacaacataagttacaccaggttcatctttaaatgtaacttccttatagaagagaccttttttagcactatactctgttttttctgatttaattttatcttttagatttttctcttccaagtaactgtcaattagttgaatattcttatggccttgatatgttttcagaccaaagaaaaatgctactgcaacaattaatgaaataaataatataatgataactttaatcgcgttttttttcttcttcattatgtaactcctttttgcttatctattcagtatgaacgaatcaatttatttaataaagagtttttaccagattgtaacaaatttttttattctcaatattattatagaaatcgaattacatacacgatgcttttaaaaaatttaataacaaattttattttactatctatcaaaataattgactacttttaacaattaaggatgatacaattacatttttttcaatttaaaaaatcagtcatatcagtaattaccgatgaaaatactaagatatcgatatattttgcattatttaacatttaaattcaattatagacaattcaataattgcgatgaaatcagtacttgacaactattacacttcataatattgtttattttaacaaggagtgattggatgtatgtagaaaacagctatcttagcaaacagttgtgttttttattttatgtttcttcaaaagaaataattaaaaaatacacaaactatcttaaggaatatgatttaacctatactggttacattgttttaatggcgattgaaaatgatgaaaaacttaacatcaaaaaattaggtgaacgtgtgttcttagattctggaacactgacaccattactaaagaaattagaaaagaaagattacgttgttcgaacacgtgaagagaaagatgaaagaaacctacaaatttctctaacagaacaaggtaaagcaataaaaagccctcttgctgaaatttctgttaaggtctttaatgaattcaacatttcagaacgagaagcatcagatataattaataatttgcggaattttgtttctaaaaattttgactattccgacaaaaaataactccctatcataaggtgatgggcagaagtatgcatcgatatgtttattcattatctttattgcttgtataaatctcgatgctcagttcttttgccctgattccttatcaggcacaaatctacccatttattacttttttatctccccttttactttaacttttttaatactactcatataatggctttgtaatacaaatttctataatggaagtgatgatattgaacttcaatcaattcgagaatcaaaacttttttaacggtaatccaagtgatacatttaaagatttaggtaaacaagtatttaattacttttcaacaccttcatttgtaacgaatatatatgaaacagacgaattatattacttagaagctgaactagcaggtgtaaataaagaagatattagtatcgatttcaataataatacgctcactattcaagctactagaagcgcaaaatacaaatctgaacaactcattttagatgagcgtaacttcgaatcattaatgcgtcaatttgattttgaagctgttgataagcaacatattactgctagttttgaaaatgggttattaaccattaccttgcctaaaatcaaaccaagcaatgaaactacttcatcaacatctattccaatttcatagttaaatttaaaatgaatacactactaaagccttaatgtcatgctacgaatattgcgcatgatattaaggctttgtatttaactaaatgaatggcatgtattacatatcaaccgtttttcaatgagccatattctttttggtataaatgacgcatggtaaataatgcaatacatccaaataccgctaagaaaataaatgctaaatgacttgatcctgttaaattagctacgtacgtgattactagtggtgggaagaatcctcctaaaccacccatcattgatacgataccatttgcggatcccgcttcatttaagaagtatgatggtactaatttgaagattaagccgttaccaatacctgcacaaatacttattgttaaacagcctacagtgaataatgcgatatggtctgaaatacctaaaataatggcaccgataatcataacaacaaaatcaatcatcaatactttaactgcattaaatttatcacctaaaatgccacctattggtcttaagaatgttgccagcgcaatgaatacacctgatcgaataccagcatctactttgtcaattccaaaatgatttactaagtagttaggtaagaaaataccaaatgctacaaaagcaccaaaagtaataaaataccaataacttaagtaatataatttgtagtttttagataatgttttcatttgagccattaatggtactttaattttacgttcttgtgtgtcaccaaaaatgaacataattaatgcaaataaagcgataataattaagtaacttctaactgttgtttgccaaccaataatacccgctatcggtggtgctaaaaatgaagaaactgctgtaccgatatttcccataccataaataccatttgctagacctactttttctttagggaaatatttaggaactgatgtaacaccaactgagaaaattgcaccacctacaccaaggaaaaatcctgaagccattaacatacccggtgtttgtgcttggcttaagaaaaatatcgggaataacaatacgataaaactagtaaagaatacccatttagcgccaacaatgtttgttaaataaccaaatggcacacggagcaccgatcccaaaataactggtatcgctaaaatgattgatatttgaccttcagtaacattgacatcttgtttaataaagggcattaatggcgcaattatactccaagccataaacccaaccactaaacttaatgtttgtaatgtaagttgaaagccaccttttgttttgtacatacgtttcaccttcatcaaaatcatttattttttaatagatatcaatactctgcctatatattagaggtcaatgttatttaaaaatgctttcatttatatgaaaacattcaatatagacaaagtattgactacatatatattttattatgattgtgaaaaagtgaacataaggattttcccttatttatgaagtgatttaccctatacaatgtccctttaagatgcttttagacacttattcgccatcattttaatcatattatttaggaacactcacatacttttcttaatttttttcaattagttacaattactgcttgaaaatcacgttacgttatcctttatgctgacaacataaggaggtttatcatgtataaaatcaatattattagatcagattccgtctataataatatactcaaggcaccaataaacgaccgtgattcaattttcactaaagaaatattagtaccttttaaaaagaaatttgaggtacaacatatgcctatttataatgatgacaaacagacaatgagtgcgattcaatttttagatgcctttcaaatttctcccaaagatttacgcatgtctgaccaaatgtcaatacaatacctgaataatgatttctggagtaattgcgaaaaatatttaaaagttgctatagatcaattttcaaattatagtatctcatctcaagtttctaactatcatttcacagtattacttggagatcgccaaaaaccacttatgtatctaaataaaaatcgcggtggtgatggtggcataccaggttatattatgatttatttagtgccgagtacaagtacaattaattctatgaaaagcttaattgcacatgaagtaaatcataatatgcgctatcaatatattgattgggatggcggaagtttgattgaattgattattgcagaaggattagctgaaaactatgtagaatcattgtatggtaaagcgcatattggaccgtgggtaacaaatactaattgaagtcgtgataacgtaaaaattaaaaatactatttataatcatttacatttaaagcatatatttgaatcgatgccttatctctatggtgatgatattaataaacttcaaggtaggcctatcgttggcttatctcatgctgccgggtatgcatgtggctatcacttggtaaaatactttttacaaaaaacaaacatacctattgaagttgctacaacacttccagcacaaaaaataataaatgaggtgactgaattttggcatacacatacactttaaaagatattattgaaattacaggtgtaactaaaagaactttacattattacgatgaaataggattattagttccagataaaaatgataaaaattatcgcgtttataaacagcaagacttagaaaaattacaaaagattttaatactcaagtcttttgattttgatatcgctaaaataaaacaatacatttcgtatgataatgaacaattgcgaaagttattatcagagcaaataagcaagttagataaaaagatttctgacttacaattaattagacgctctgtatgtgaatttattaaaggactctctctaatagataccagcattttaaacaagacactacagtcacaatatgataaagaagcatctataaaatatggtcatacgaaagcatatcaatcatttattagacgtaaagacagcttacaatcgcaggatatcagacataaattgacaactatcttcaataaatttaatcatatgtctttgagtcattatccaatccaagattgtagtgatctcgtatttgagtggaaggcatttatgaacactatcgctgattttgatgatgaaacattatgctgtattgctaaaacatatgaagatgatacgcgtttcaaagattactttaattcatatgataatcaaaatttagcatcatacatttcagaagctgttaattattttttgagcaatgtgaataagagcgacaatttttaatcctcatacagatgctacaacactgaatacaccaactaaaataattgttcaaagtagaaaactaatcatttattctctaaatcaataactatattaaaagttatacctttgcaaagcgaattagtataggttaccgaaaggagaaaggattaggttccattcgatttataaaaaaatatatttcgaaacatacaaaagcgccagaagataatcatttcctctcgcgcttttatactgaattatattaatttcaaactctaaaactctaataatttctttttcaatgcatattcaactagctcaggtttactctttaagccaagctttgtcataatatgcgtcttatgtgcttctactgttttcacagatacaaataatttctctgcaatttctttattcccgtaacctttggcaataagtggcaatatttctagttctcgttttgataagattttaaaaggatctgttgtgtttgcagtgtcctgatttgaattagatacaaattcattcactaaagatgttgtaagtttcatatctacatatgtttcacctttatatacagttcgaatagctaacaataattgttcatcaggtgcatttttcaatatgtaacctttcgcaccattacgcaacacatggaacaaatactcctcatcatcaaacattgttaatattagtattttagtttcaggaaaactgtcagcaattttactcgtagcgataagacctgactcacctggtggcatacttaaatccattagtaacacatcaggtttatattccattactttttggtaagcttcgacgccatctgcagccgttgcaacaacttccatatcattttgataatttaaaatcatagagaaccccgtacggacaacagcgtgatcatcggcaatgactattttcaattttattcccccaatgtatgtttcaaattggaatgttcaatgtaacattggtaccctcaccaattttcgtttcaatattgacgctaccgctgactaactcagctcgctcattcattccatataaaccgagtccagaacctttaggcttagaacttggatcaaaaccatttcccgcatctatcacttctgctaccaaatggcgcccagtttgacggatacctacatttatttcatttacatcagcgtatttcaacgcatttaaaatagcttcttgcactactcgataaacaaccgtttcaatatcactatcaaagcgagtatttttaatatttgatgtatatatgatttttattccataattttcttcaaactgtttaaaatatgatttaaaagctgcttcaaggcctagatcatccaaagaagcgggtcttaattcaaccgacatattacgtatatcatcaattaatttagcgacaatatattcaatattttctgcgtcttccaaaagcttagttgtatcttcttgatattttaataatctcaattgaacatctacattgagcatttcttgaatcacactatcatgtaactctctagaaattcgctttctttcattttcttgggctgagattgttttacgcatcatacgttgttgatgcaatttctcttgctgttcaatttgtgatgaaacattttgaagcgtaaatgcatgaattcccctgtcttgatcaatcaactgatatgttgctgtaaatggcatcactttttgatctttcgtcttcataaatacttggaaattcgtagcttgtacttgcatcgattctaagaaacagtctttacatgattgtacatcataggcatttgtatacccttcacatctgtgacaaatcgcattcgccacagcactgtaattatcttcttcagataatatatctttagcagcatcattcattgcaataattttaccgttatcatcagcaaaaactatcttttcgattgaatgctcataatattttttcaataaagtatctaactgtatactgtcctcattaatcatgacttacaccctaattcatctcattatttatcatcattgaaaataccaaacttacgttgaatatcatcattatcaaatatttttggtaaaggacgaccatctctttgaccaaataatagtacgccatacacttgattcttataccaaagcggcactgctaaaactgctgttaatgattcgctcaataaaattggatagtcaatcttttcttcaggccctaaagctaaaccaacattggctattaccatacgctttcctgttttcataacagttccagctaatccacgaccttttcttaaaataatcaatttaaatcgattatttttattacctgaaacatagtgccattttattggagatgatggtttgttagattcatagaaagcgattgccgcaaaatcataaccctcttctttgcgtattttatctaatgtctcttgaaatctacgatcttcaattattgcttctggtgtcaaatcctttcacctcttatgcttacactttattcttacggtaaataatatatctgcgatttatatatgtcaaaggtacactccaaacatgcaccaaacgtgtaaatggccaacaagccataatagtgaaacctaacaatatatgcattttaaatgcaatcggcacaccactcatcaatgacgcatctggttttaacataaataattgtctaaaccaaattgataatgaagttctgtagttaaagtctggatgttgtatatttgttactaatgttgcgtaacatcccataaatacgataagtaataataagaaatttacaaatatatccgacgctgaacttaatcttcgaatacttttcgtagtaacacgtctcgctgttaataaaaacatccctatcaaagttattataccaaagatgctaccaatataaacagcgcctatatgatataaatgctcagacacacccactgcatccatccatggtttcggtattaacaatccaactacgtgtccaaaaaacactggaataatacctaagtgaaataataaacttccccacatcaacctttttctttctattaattcactagatttagctgtccaagaaaatttatcataacgataacgtgcaatatgacctgcgacaaagacaactaaacataaatacggaaatataacccataaaaactgattaagcatgatgtttcactccttttggtgatgtcaaacataatttcaatgtttttctaagtgcttgaatcacataggcatatggattgttatcttcaccaagtgcattcgccatcacatatgttccatcctcaataatcataatgattaattgaatattctcttcagctcttggatcatttcgccattctgccacttgcaaaaattgaagcatcaacggtagataatcagaaagttcattatctaccatttctagtccaaacatttcatataatacctttaatttagctaacatttgcccacgttctttttgcgtatcaaatttgttatacgtcatatataatggtgcttttttcgtaaaatcaaatgtatctgtataaatcgctttgatttctgataatgaaaatgtcatcattacatttctaaatgctactaaatcttcatatgctggatgatctttcgaaattgtttcttcaaaagtttttggatgaaaagttaatttttctggaaaacataactgttgtgccatatatccaaaactttcttgatattttttaaaattatcgaaattaatcacggaaaatccctccatagaaattctcattataaatttcttgaccagttttccctgaacctactgcaacgccacagccttcacagttatctccaaaatgctcgccgccgtaattgtatcctgtactaccttgtgcgtgatacgtatctaaataggtttctttgtgtgatgttggaataacaaatcgatcttcatatttggctagtcctaataaacgatacatgtctttagtttggcgctcggttatacctaatcgctctaatcgagacgtgtcaaatggctgttgagtaacttgagatctcatataacttctcatcattgccatacgttgtagggctccttttactggctctgtatctcctgcagtgaaaatattagctaagtattcaataggtaaacgcatttcttcaatggctgggaaaatcgcatctggattttgagttgtatttttaccttcaaaatagctcataattgggctaagtggtgggcaataccaaaccatcggcatcgttctaaattcaggatgtaacggaaatgcaagtttatattcaattgctaacttataaattggagagttttgtgcagcttcaatccaatcgtaaccaataccatctttttcagcttgagcaatgacttcttcgtcaaatgggtttaagaatatatctaattgtttttcatataaatctttctcgtctactgctgaagctgcttcatgaactcgatctgcatcatataataaaacacctaagtaacgcatacgtcctgtacaagtttcagagcataccgtaggcatacccgcctcgattctcgggaaacagaaagtacacttttcagctttgttcgttttccaattgaagtaaactttcttatatggacaacctgtcatacagtaacgccatccacgacatgcgtcttggtcaactaatacaatgccatcttcatcacgtttatacatagcacctgaaggacacgatgcaacgcaacttggattcaagcaatgttcacataaacgtggtaaatacatcataaaagtttcgtcaaattggaatttaatatcttcttctattttttggatgttaggatcttttggacctgtaacatgaccacctgctaagtcatcttcccagttaggtccccattcaatttcaatgttatcccccgtaatttctgaatacgctctagcaactggcgaatgcttccctgatttcgcagttgttaaatgttcataattatagttccatggctcataataatctttaattaatggcatatctgggttataaaaaattttacctaaagcaatttttgaaattctacttccagattttaattcaagtttccctttacgatttagtacccaaccacctttgtagtgttcttggtcttcccaacgtttcggataccctacacctggcttcgtttctacgttgttgaaccacatgtactcagcacctggacgatttgtccaagtgtttttacatgtcacactacacgtatggcatcctatgcatttatctaaatttaataccatcgcaacttgcgctttaatcttcaagccaattaacctccttcatctttctaactgctacatataaatccctttggttcccaattggtccataataattaaagtgataactaatttgtgcgtatcctccgactagttgtgttggtttcaaatggattctagtcggcgcgttgtgtgaaccaccacgtgtatctgtaatttctgacccaggcgtttgaatatgtttatcttgtgcatgatacataaacattgtacctttaggcatacgatgcgaaataactgctcttgccgttacaacaccattacggttatacacttctagccaatcattatcttggatatcgtgtttttcagcatcttcatttgatatccaaaccgttggaccacctctaaatagtgtcaacatatgcttattatcttgatacattgagtgtatattccattttccatgaggcgttaaataacgcagtaccaaagcatctgtaccacctttaattttcttatctctattcccaaataccattggcggcaatgtcggtttatatactggtaagctctccccaaattgttggaaaacttcgtgatccacataataactttgacgtcctgttaatgttctaaaaggtactagacgttctatattcgttgtaaatggtgaatatcgtcgaccttgtttatttgaacctgggaatactgctgtcggtattacttctcgtggttgtgaagttatatttaaaaacgaaattttctcagcagcgcgttcgctagaaatatcttttaacggcattccagtttgttcttcgagatcttcatatgatttttgtgataatttaccattcgtagcagatgaaatacttagtattgcatcagctacattacgtgctgtatcaatacgtggacgattcgctctcacagaatcatcatttgtatcactccacgtacctaacatactttttaattcttcatattgttcactgacaccgaaacttacaccatgtgctccaactttccctttttcaagtacaggaccaagcgtgacatatttgtcgtaaattttagtgtagtcgcgttctacaattgcaaagttaggcattgtacgtccaggtaccgcttcaatttcacccttcgaccaatctttcactacgccgtatggtgttgaaatttcttgctttgtatcatgactaagtggagttgtcacaacatctttaaacgttccaggtaaatagtcttttgccatttctgaaaatgcttttgccaacgttttataaatatcccagtctgaacgcgattcccataacggatcaatggcaggattgaaaggatgtacatatggatgcatatccgttgatgataaatcatgtttttcataccaagtcgctgccggcaaaacaatgtcagaatataacggtgttgccgtcattctgaagtctaaagagaccactaaatctaacttacctgttgtttcttcacgccacgtaatttcttctggcttttcatcttcatttggtgtagctaataaccctgattttgtgccaagtaaatgcttcataaagtattcttgaccttttgcagaacttgaaattaagtttgaacgccatataaataatgattttggatgattctttttcaaatcaggatcttctattgcaaattgtgtttgttttgatttcacttcatcaattgcacgttgcaaaatcgcttcatttgaatctataccttcatctttagcttcttctgcaaacaacaaactatttttattaaattgtggatatgatggtaaccaaccaagtctagctgctaaaacattataatcagctggatgttgatgctttaactcctctgttttagctaatggagattttaaacgatctacatttgactcttcatatttccattggtctgttgcaaaatagaaccaacttgttccgttttgcaaacgtggtggtccttgccagtctttcgcaaatgcgacagtactccatccttcaatcggacgacatttttcttgtcccacatagtgagcccaaccgccaccattcacaccttgacagccacataacataactaagtttaagattgaacgataaatcgtatctgagttaaaccaatggttaatacccgcacccatgataatcattgaacgcccttcagtatcgatagcgttttgcgcaaattctttcgctacttgaatgacaacactttgttttacgcctgaaatggcttcttgccaagcaggtgtatattttgattctgcatcgtcgtatccttttgattctaatttatgatcaaaacgacgcacgccatattgacttgccattaagtcaaaaattgtagcaatacggactttgtcaccatttgctaaagtgacttgtcgagttggaattggacgattgaatatcccatctccatcactatcaaagtatgggaattgaattgtttctaattcgtatccaccttctgtcattgataatgtagggttaattttagaaccatcttctgtttctagttttaagttccacttcttaccttcttcccaacgttgacccattgtgccattaggtactactaaactatcgctgattgcatcatgaataactggcttccattcgccttgctctgttgtttgacctaagtcactcgctcttaaaaatcgacccgctttatatccattttcatcttcatccagcatgataagaaacggcatatctgtatattgtttagcgtaatttataaagcgttcattaggttgattaacataatgttcttgtaaaataacatgcgtcattgcttgtgcaattgcagcatctgaaccaggattcggtgctagccagttatctgcaaatttcacattttctgcgtaatctggtgctactgaaatgacttttgtacctttatagcggacttcagtcataaaatgtgcatccggagtacgtgttaaaggtacattagagccccacataataatgtatgatgcgttataccagtcacttgattcaggcacatctgtttgctctccccaaatttgtggagaggcaggtggtaaatctgcataccagtcataaaaactaagcatttcaccaccaagcaaattgatgaatcgagcacctgctgcataactaatcattgacatcgctggaataggtgtaaatcctgcgattcgatctggaccatatttttttattgtatacagtaattgtgctgcgattatctctgtaacgtctttccaatttgaacgcacgtgccctcccatacctcgggcttgcttatattgtttggctttgtcttcattttcaacaatagacgcccatgcagcaacgcgattaccattgttttcttctaatgcttcagtccataaatcccagagttttccacgaatatatggatatttgattcgaagcggactgtattcataccaagagaatgacgcacctcgtggacatcctctcggttcatattcaggcatatccggaccacaacttggatagtcagtttgttgattttcccaggtaatcacaccatttttcacaaatactttccaagaacatgagcctgtacagttaacaccatgtgttgttcttacttctttatcgtggctccaacgttctctgtacattttttcccattctctacttttactttctaggatcgaccaattcccattaaatttttctgttggcttaaagaaattcaatccaaattttcccatatttatatcctcctacgtataaaaatacgatgtgtagatgtcgtgtttttaaatactttaaaatgcccaagactattgctttaattagattgtacattttttcacaaacataaaatattagggaatcacctaattacttaaggaatttccctatcaataacgggatttcattgaaataatacacaatcatgtatggtcatgcttattgccaatctaaatcgttcaaatttggcacaacgacaaataaggcttcaacacgaatatattctctcggttgaaaccttacttattcatttattttttataaattagtgacataacactgtattagcatctgcacgatcggttgaaatatatgttacattttcttgctgcttaataaatgcatcatagtaatcatattgcgacgaatgatatgtgccattcgatgtatcatttgggtttagcaaacagccataaccttcgtcatataaatgttcacagagcataagggcgtcatgtttagaaccacttactacataaaattgcttcataggatcatatgatttaggagtgttttcagtataatcaacaacttcccctataatacatatacctggtttcgcctcaattgaatagtgttgcaattttgaaataatattacttaaacgccccttaacaacaaactcgttaaaacacgatgcttgaaagacaatcgctatcgggtaatcaatatctgtgtattgttgtatctgtgtgataattttccctaaacgttttacccccatataaattgctaacgtgccaccattcactaaggaattgacatccacttcattttcttctgaatctttaaagtgacctgtagaaaatgtcacacttttagcaactgtacgcattgtcaaacctgtctgcatagtagcaactgctgcgctcgctgatgtcacccctggtacaatttcaaacgcaatatgatgttcatttagtatgtcgacttcttcttgcacacgaccaaatatcgctggatcgccacctttaagtctaacaaccttgttatatcgacgcgctgcttccacgatacagtcatttattttttcttgctgaatatgttttgcatacggctttttaccaacatcgataatttcagtagtcaaattcgcatattgtaaaattaacggattcactaatcgatcatatagaatgacatccgcttcacgtattaaacgctcagcctttttcgtcaaataattcggattacctggacccgcacctatcaagtaaaccttgccatattcctctacagacatatatatacgttcccgtctgtaacttctacctcataaacatctacacaaccttcatcaggttcttgaacaatacctgtatttaaatcaattttttgatcgtggagcgggcaaaatacatattccccactcactgtcccttcagacaatggtccttgtttgtgtggacagatattgtgaatcgcatgaattttgccactttctgttaaaaacaaccctacctctttgcctttgacaataaccttttttccaattaggggtgttaattcatctatagttgtcactttaattttttcttttgtttccatgtattacaccttctccacttcaaaaattctacgtgcttgagcattgctagttattgcttcccaaggttcagcttcgactgcttttttagcatccataatgcgttcaaatagttcattttgtctttctgggtcaagtaagacttcttttacattttcaaatccaagtcttcttaaccatggcgctgttctttcagcatatatacctgtttcgcgataatattgcatcaaagcaccacataatttgattacttcatcttctgtttctacagttgttaaaaattcagctttttcaacttctgtaccaccattaccaccgatatagatttggaatccattttcaactgagataataccaaaatctttaacacctgattcaacacaacttcttgggcagcctgatacacccattttgaatttatgaggtgtatcgatgtattcaaatgttttttctaaacgaatgccaagtcgtgtcgtgtattgcgtaccaaatcgacaaaactctttaccaacacagcttttaactgagcgtgttttcttaccataagctgatgctgaacgcatacctaggtcttcccatatatttggtaattcttcttttttaactccatacaaaccaacacgttgtgaacctgtcactttaactagtggcacatgatatttcttagccacttctcctagacgaatcagttggtctgcatctgtaacacccccacgcatttgaggtataacagaaaatgtaccatcattttgaatattcgcatggtaacgttcgttagcaaatcttgattctctttcatcttcatgatcatgtggataaaccatgtttaaataatagttgattgctggtcgacattttggacatccacctttatttttaaagtttaaaacatgtcgaacttctttagatgtttttaaacctttcgctcttatttgcgttactatttgatcgcgtgtcaaatcagtacaaccacatataccagcaggttttgcggcaacaaagtcatctcctaaggtgtgctgcaatatttgagcaatttgcggtttacatttaccacatgaattccccgcttttgttttagccgttacttcttcaactgttgtaaagccattttccgtaatcgcatttactatagtacctttatcaacaccattacaaccacaaattgtttcatcatcagccatatcagcaattgatagcgatgcctcttctccacctttagtaagcaatgatacaagtgtgtaatcttcagtggattcaccttttttcatcatgttataaaagcgtgaaccatcatcgatatcaccatatagtactgcaccaactacattaccgtcttttaaaaagatttttttatagttattatcaacactattaaatatttcaatacctttaatttctgcattttctacaatttgaccagcactatacaagtcacacccagaaacttttaatgacgtaaatgttgttgatcccttgtatccgttcgtttctttatttgttaaatgatcagctaatactttaccttgttcatatagtggtgcaacgagtccataaactttgccgttatgttctgcacattcaccaactgcatatacattgctatcacttgtttgcatcacatcattgacaacaataccacgattaacatctagacctgattctttggctacttctgtgtatggtcgtatacctactgccataacaactaagtctgccggaatctcgcgtccatcagccaatttaacaccctcaacatcatcttctcctaagatttcagttgtgttggcttgcatttcaaacttcataccttgcttttctagatctgctttaagcatatttccagctttacggtctagttgcatttccatcaaccattcagctaaatgtaacaccgttacttccataccttgatctaataaaccacgtgcacactctaaacctagtaatcctccaccaattacaattgctttctttttagtcttagcaatgttcatcatttgttcagtatcatcaatcgttctccaaccaattacactcggtaatgtcgaacctggaactggaatgacgaatgctttagaacctgtcgcaaaaatcaatttatcgtatgatacttcaataccatttgcagtagtaactgattgatttgctctatctacttcaattacaggatcatttgtaattaactcgataccatgttcctcataccactcatatggattcataattgtttcttcaactgtcattttattttgtaaaatatttgaaagcatgatgcggttatagtttggataaggttctttacctattaccgtaatatcatataaatcgttggcgcgctctaatatttcttcgattgttcgaatgcccgccataccgttaccaatcattactagtttttgctttgccataaaatatgcccctttactccataatatttatttcaaaaaaaggtattaatttttcgttagtgcttttatattttcattggaatcattaagctttctaatctatcgttaatgatttgctttaaaattgggtcgaagttaattgaaggtgtgaagtgtatatctgtattaataaccatgtcattcatttgctgcttcactttgttaacaagtcttccgtcatataaaaataatggtacgacaatcaatttttgataccgtttcgagatgctttctaaatcatgtgtaaaactaatctctccatatagcgttctcgcatatgtcggcttgctaatttgcaaattttgagcgcatatttgtaactcttcgtgtgccttagtaaactttccattaatattgccgtgtgcaacaaccataactccaacttgttgttcgtcacctgctaatgcgtcacaaatacgttgttcaattaatcgtctcattaaaggatgtgtgccaagtggctcgcttacttctacctttatgtctggataccgtcgtttcatttcatgaacgatattcggtatatccttgagataatgcattgcactaaagattagcaatggtacaattttaaaatggtcaaccccactttgaatcaacgtcgtcattaccgtctctaaatcctgatgctcactttctaaaaacgcaatatcatagtgatgtatatcatcttttactaattcagaaataaatgcttctaacgcttgattctgtcgtccgtgcctcatgccatgtgcaacaatgatattcccattcacatttaccaaccctttcacacgtattgtataccaaatcattttgtttttgtgaaaagaatcacattataatgtaaaatcagggaattccctgatgcctgtagtcatgcatattccttatacattttccctttttgttaaatcaaaaaaagcgaccgatatatgaatccctactcaacatttatttgagcaagcattaatatatcggtcgcttgtagtgtatattattatcttaaaatggtggttggcctaatattgtttcgtcaaagcgctcgggtatcaatactttgcgcatgatcacacctaaatcgccatcatcattttcatgttcgctgtatatttcataacctcttttttcataaattttaagtaaccacggatgcaatcttgcagatgtacctaaagtaactgccgctgactttaacgtatctcgcaaaaatgcttcttcaacataagtaagtaattggctaccatagcctttcccttcatactcaggatttgtcgcaaaccaccagacaaaaggataacccgaaatacttttcacacttccccaaggatatctaaccgtaatcgtagatataatttcatcatcaattgtcatgacaaatgtagtatttttatctatattttctttaacagcatctaaattagcattaatcgaaggccaatcaatacctagttctcttagaggcgtaaatgcttcatgcatgagttgttgcaatttttctgcatcttgttcacttgcgagtcgaatcatcgtttttgtcatattaatccccactcttttttaaatgatttaaccatattttatttttaaaataaatatccatcaaagtgtatcaataaatttatcacatgtcagaaagtatgcttcatctgaatacaccaatactctcatgaaacttattaaaaattactctctcaacgtaaaaaaccattcaaattcatgaatggtttggaagaatgattcattgttacgctatttaatcactacatcttaattattgttgctctaaacgattacgcttaccatttaagaaagcataaacgagacctacaaaaataccgccaccgacaaagttacctaagaaagcaaaaacgatattttttaaaacgtgtaaccatgaaactgcatcaaggttaaagaataccatacctgcatatagacctgcattgaacacaacgtgctcatatcccatgtatacaaagaccacgacaccacaagctatgaagaatgcctttgttaagccgcctttgaattgcatagagatgaaaataccaatattaataaagaagttacagaaaataccttttgtaaaaatattcaaccatgttgaatcaacagtctttttctgaactaaagctgttaaagcttgtgtcatttcaggtgtcatgacatgcgcaaatttcattaagaaaaataacacaaacccacctaaaatatttcctaagaaacaatataataaaatccaagtcatcttcttaacagaaacgactttataataccagcctactgtaaagtacatgaagttacttgttaataattcagagttagttaatacaactaaaatcaaacctaaactaaacgcaatggctcccattaaattgataagtccatctacgtgagtactcgcaaactgcgtctttattccgaacataaatacagtaacgattgagagtaaaaatccggccatcattgctttaagcatatatcggccaggtgtttgctgtaccattacttgcttcatttgtactgaagatgatattgaatcaacaattgcgcctgttgaatatgtatcttcaactgttttcttattttctatcacagtacttcccccatttactttgatcaaataaaatttactttctaattatattagtaaatcaatgtaattgatagattaaatttcagaaaaatctttttattctctcgaaaatgtagttttctttcataaaaacagcgagataaatcgcgtgattggctaatatctttatgatttaagatattacgacgctcattttatctcgctttatgtaaagtattacttattcttttttaaatttgaaaagtaatgtaaaccatatgcaaatacactgtaaccaattgcagtacgtaaaataaaccttataactttattaggtacacattttgacgttactgaaatagaagatagtagtgttgtgaaaatatataatattaaaactttgatataacgttctaccatcgaatcatccctcatttttataatattacaagattattataaaccgaatgaaacaaaaaagtttttacatattttcaacaactttatttcaataaagcatcaagttgatctaaagtttgattcataccttgttcaacacccatgtttatgacttgttgagcggcttcttttgttggaaataccgatgttgatgtcactgtcgttttcgttgtattgctcttggaaaatgacaaagtaattttcatgcttggcatttttgtatcttttgcaccttgaggtgtcgcaaatgagtcaatatattcaattaaatatggacgcttaaccgttttatattctgctaatgtatagctggtcattgtaggtgttttaatcgcataaaatgcatcaccgcctgaaacagcattaaagcgaaacactttggtactagcgtcttttggatgaaaccatttttcaaataatgcttttgtcgtataggcatcaaacaccttttcaatcggtgcttctatcgttcttgaaaaaataattttattatcttcaactttaatcgtcatcttcccactccctatcttttatatttactcatcttaacatgcattgagtaacatatgttaccaaatcatttgttataaactatagtaatattaatcattccctctgttgaaattgataactacgaaataaaaaacacactctattcagctattaacagttgagtagagtgtgcaaacctgttgaattaatgcgctaacatttcttctttgatttggtctttatttaattttgaaggataatatgttggccagttatccatttcttttaataacgcgtcattatcattacccataaagatatggaagtgttctgcctttttaggtgcaatgttgtgatcgctaaattggatgaatttcggtaagtctttatcattaccatcgaccaatttaaacataaatctcacgccacggttacctttaggatatttcaatgttttcttaccattgtattcatatttaccagtgtgtttcttaccatctttagtaaatgtaatttcatttccttttatatcaatgttagtaatatcagttttatatcctttgtcataataagcttttaaatctttagcagatttcttcggatcattttcagctttatgttccatcacttcatcaagcgtaccgtcttttaagtaagggtaaacagattgccattcaccagcataatcgcttaattcacggtctttaacttgctcatctttaaaatacccatcagaaattgctttgtcatgtttactttcagctttgtcgtctttcactttaacaccactgtctaaagctttaccgatattttcaatattagatttcattaatgattgatacgtaatattatcttttttctgttgttctttatttaaagactccatgttgtagaattttaaaggcttcgcatctgtttctttacgaattgtttcagtcactttattcgcaacattatcttcgtaaagaatatatttagcattgctatctctaatttctttaacaattttagttaattctttttgtgatggatcttcagcattcatgttttgaatacctttttgaacaaaaccataacaatcagctaagtatccaattgattcatgtgaaatgaatactgcattaccttgcttatcttttgtaacttgcttcatatcgttatcaattttcttaagatcgtcgtttaattttttgtagtttttctcatagtcatctttatgttttggatcttttttcactaattcatctttaatttctttagcgaaagtttggttaattttaggatctaaccatacgtgtggatcatatccaccatgatgatgatgatgttcttctttctcatgatcatgtccctcatgttcatgctcttcaccatgctcgtgttgatcagttaaaagctttgctttatctaatttatcctctaaagacagttttttatctttatctttgatagtagatgcaactttcttagcaaccggatctaaattatcccctgtatacataaacaagtctgacttgcttgcacttaatatatctttttgtgttggttcatagctatgtaaatctgtccctgctggatagattgatgataccttcacgtgttttccaccaatttgctctgcaaatgattgcaatggataaactgtcgttttaattgttaccttgccatctttatcttttccatcatcattcccacatgcggctaatgataaagttacggctggtacaagaagtaacatacctaatttctttttcatagtcaccctcctaaatagtaatctttacgttttaaaattatatactcatgctacttaaaatacaagcactgtttttataaataatataaagtcgaatcatactttaggtatttaccacttttcgttttatctaatacatgactattgtacaaatatgatacagaaaactttatagtatttacgaacgtcataatataagaaaaaaagacaatctctatcatattgctaatagaaattgccttttcatattgtcctaaaataacttaccctatttttatagtgtgacttttagatttaataatggtatttacatgatgctatttttatatgattgtcatctactgtataaaccaatctatgttcgtgattgatacgtctactataatacccagtcagattcgattttaacttttcaggcttacctataccttccaatgcaccatttctgtcaatacttttaagtaactcattaatcttcttcaccatttttttatcgttctgctgaaaatacttataatcttcaaaggcttgaggcgaaaacgtaatatttaacctagccattatacatctatatctttcgttatagttttcccacgttctagatctgcaattgattgagctaagtgttcagcattatttgggttctgttggaggtaaagtgtttccatcatggagttataatctgattctgacatgattactacgtttttatcatcagtagatgttacagttaccatatcactatcatcatttacttttgtcataagtgcctttaaattctgtcgagcgtatgaataatttttaataatcatatttatcgcctccttttaacacacctcaattgtacaaatatctgtacaataaaacaagcgacacagaaaaaaactactaatcaagatttcgcacggggaagaatcaatacctatcctgtactgattccctactaaacaatgtttacatgataatttccacctatttagacttcatacattaaaaagacaatctctatcatatcgctaatagaaattgccttttcgtattgtcctaataaattggtatcacttactgatctcaacaattaagactatttgattttatcttttaataacttctcataactttcataatcatatggatcttcaactttctcgccattaataaatgcagttggtgtcgtttttatatgattatctttcgctatttttttatctttctctgcagctttccaagacttgctatcttttgtcttgtaatcttttataattttattttccgtctctttatctaaatgcagttgtttaatatgtttatctaatagttcttttgttaaccattctttattttcatcttgctgggcagcaaataattgcttttgaaaatctaaaaatgatttaggtgcatacatcaatactgcatgactcgcacgcgaaccaacaattgagtctttacctaagaaagctaaattgacaaattggtattccactttgtgattatctatataatttttacgcaactttggcatgactttttcatctaattctttacaataaggacatttatagtcgccatatacgacaactaatggtttgccgtttttcgaagatgtcgttgctgattcttttttaccgcaagctgttaaaattaacatgctcactataaataatgttagtaattttttagtcataataactcctattcatatctagttcgtcatattttcttcatgataatccgcatcatgttgttgataatatcgtctcgaatcaaaatcttgcttatatgatacacgtttatcactaaaatcatatgcataataatgcacttcatcatcattactcaaaggtttataagctaaaatgataattttatccttatcatagacataaatattagcatctttgcgttcaaaatgatcaacacgatcaccgttgccttttttggcaagttgttcttgtttttgattttgaattttaactgcttcatctatttctttcacatatttatcattaccacatcctgatataaagactagtaataataataccgtcgccacaaatcgcttcaatgctcccactcctactatcaacttccaactaactttcaatataattaatactatacaccgtcaaacattaatgcgctacaactactaccaatgcatttaatataaatatccaaagaaataacagttatgtatagtcaaagaaaaatatatttcattttctatgtgtatttgtaatcagtttttgataaaataaaaaaatagcattattaataaattcaaaaattatagttcaattcagagagggatgggataaaatgaactttgtaacgttgacttcggatgagttcaatgcgtttacaacaaagcatttttcacattacacacaatcagctattcattacaatcatagagttgatttaaaaggcgatgtgcatcttgtaggggttaaagatgacaatggtcaagtgattgcaggatgcttattgacagaagcacgcacacttaaatttttcaaatatttttatacacatcgcgggccagtgatggattatacaaatcaatcattagtagcatttttctttaaagcattaacgtcatatttaaagaaacacaattgtttatatgtccttgtagatccatatttaattgaaaatttacgcaatgcagacggtgaaattgttaaatcttatgataaccgagcatttgttagaacaatggataaattaggttataaacaccaaggtttccctgtaggttatgattcaatgagccaaatccgttggctgtcagtgttagatttaaaagataagactgaagaccaacttttaaaagaaatggattatcaaacgagacgtaatattaaaaaaacatatgatattggtgtcaaaactaaaacgttaacgattgatgaaacgcaaacttttttcgacttattccatatggctgaggaaaagcacggtttcaaattccgtgagttaccatactttgaagaaatgcaaaagttatacgatgaccacgccatgttaaagttggcgtatattgatttaaacgagtatttaaaaacgttacaattaaagcaacaacaattaacagctgaactctcaggtgttgaagaagcattggaagaaagtcctaattcaaagaaaaataaaacgaaacgcacacagctagaacaacagctaaatagcaataagcgtaaaatcgacaatacaatagaacaaattgaacaagatggtgcagtcttaaacttagcttctgctttatttatctacaatgagcatgaagtttattacttatctagtggttcaaaccctaaatataatgcttatatgggtgcctaccatttgcagtgggaaatgattaagtttgctaaagcgcatcatattgatcgctataatttttatggtattaccggtgacttttcagagtcatcagaagactatggcgtccaacaattcaaaaaaggttttaacgcacatgtagaagagtatatcggtgactttattaagcctatcaaaccattactatataaggtacaaacgtacttaaatcataaacgtcgttaaaatatcgctccaagattatgacaacataacaaagaaccacgcatcatgtatatggcttcatcgccatactaaaacatgatacgtggttctatttgattattcttcatttataacatttaagaaacgtcttaattcttctgttttcggacgattgaacatctcttctggagccccttgttctccgatcatgccttcatgaataaatacaatgttattagatacttctttagcaaaacgcatttcatgtgtcacaatgaccattgtcatgccttcattagccaaatctttaataacctttaaaacatcattcacaagttcaggatcaagtgcagatgttggttcatcaaacaacatcactttagggttcattgctagtgctcttgcaatagcaacacgttgttgttgaccacctgataatgcatgtggacgttgatctttgacatgtgttaaaccaactttctcaagtaactcaagtgatttcccacgtgcctcatcctttttcaactttttaactgtgataagaccttccattacattttctaatgccgtcttatgcggaaaaaggttataactttgaaataccataccagactgtttacgaacttctatttgtgattttttatctttagatgtatatgttttgccgttaacataaactgtaccttcagttggaatttctaatgcattaatcatacgtaacaatgttgttttacctgaaccagatcgaccgattaaggttacaacctcaccttgttcaacagataaatcaatacctttgatgacttcaacatcattaaatgatttatggatattgttcaattgaatcatgagcgataccctctttcaatataagattcatagataccttggataattgaaataataaagcataccacccagtacattagcgcaactaacacataaattgttaaatattcatatgttgtagacgcaacttcttgagcttttctaaacatttcagccactaaaataaatcctaataatgatgtatctttgattaaacttaaaaatgtattacctagtgcaggaatcgacactcgaattgcctgcggtaaaatgatacgttgtatcgtttgaccatacgtcataccgatggaatatgcagcttctgtttgtcctttcggtatagaaataataccgccacgaataatttccgaagcatacgcacctacatttaatgataaaccaataatagcagccactacaggtgccaatgtccattggttgtcagcgtcatttgttaataatctacctaattctggaataccataaaatatgataaatagttgtactatcattggtgttcctcgaataatagatacatagacacgtgaaatacttcttaaaattttactcgttgaaattcgcattaatgctgtaaataatgcaataatcaatcctaaaacaaatgtaactaatgtaataggaattgaatatttgaccaaaccttctagcataggtccgaaagcttgttttgcagcatctagcgcatgttgttgttcgctatttagatttagaaacatcttgaccaaaccatttcttacctattttagctaattcaccgttttcctcgatttttttcaagccatcattgaatttttgaactgtttcatcatctgcttttttagaaaatgcaaatgcagatctactttgttcagcattacctttgattgctttgatcttagcattaggtttttgttttttataatccaagtatgacagactatcattaaatgtaccatcaacacgcttagacaataataaatccattgattggttaaagccatcaacttttgtaatatcagcacctttatccttagctaatttaccataattagatgtgaatgtttgtgctaacttcttacctttaacatcatcaaaatctttaatatctttttcattttcacgaataactaaaacagcacttgagaatgtgtaaggcttagaaaatttatatttcttttctctatcaggattaatacctacttggttcgcgattacatcaaaacgccctgcgtctaaacctgcaaacatagaatcccaagaagtttcattaaatttaagttttaaaccttcttctttagccactgctttaataacatcaatatcgtaaccagttaatttaccatctttatcgtggaaactaaatggtgcataagtcccctcagtcccaacattaattgtcttgctatctttactagcttccttgtctttcgacgaattgtttccgcatgcagccaatatgaaaacgaaagctatcatcacaaataaaagtcttttcatagaatatatctccttattcttattattctaatcggaataaaaatattttaatctgaaatgccggataagtcaatatgttgaacttttgctaaaaagctttatatagctagcaacttatatttattgacgagaatcaacttcttttttcttaccttgtaacataaatgaacaaaagaaactaacaactgtaatcaataatgcaaataaaaatccagcgtgataaccatgcaacatcgtatcaactttaatttgattcatcatatcaattttgttcatgccattatagtctgacatagttggagaaaagtttttgcttgcatgggataaaatagtaattaatgcagctgttccgatagaaccagcaatttgttgtactgtgtttgtcatagatgaaccatgtgcattcatttctggctttaattgattcatcgtatgggtcattactggaattaatcctaacgcgataccaaccattcgaatcgcataaactgttgccaacatgattgttgatgtttgttcatccattacaacaaaataagccgtagtaataacaacaatcgccatacctactaaagcaagatttctaggaccaaacttttcatataaagcacccgaagtcatcgacataaatgccataacaattgctcctggtaataaagttaatccagaatctaaagctgaacgatgcaataaattttgcacaaagataggtaaaatcgtttccgaaccaatcatcgataccattgtgacacccataataatgataccaactgtaaattgtttatttttaaatacagcaaaatttaataatggtgttgatagccgatattgacgtaatacaaataatgcgactaaaacaacgcctccaatcatagatactaatacgataggattatcaaaacctttttctgaaattgaactcgttccatacaataacccgccgaaacctagtacagaaaaaatgacagaaataaaatcaataggtactttaattgtagttccaacattttttatcgttttaaatccaattaaaaatgtcacagctgcaattggagcgacaacatggaaaagcgatctccagttaaaatattcaacaaggtaacctgaaagagtaggtccaatagctggtgctaaaccaattaccaaaccaaatatccccatatatttaccgcgttcatgtggttggaaaacatccaaaatcgttgtcatcatcaatggcatcataatacctgcgcctaacgcctgaataattctagcaactaataatgttgcaaagtgcggactcaagccgccgagtaatgtacctaagaaaaagatagaaatacccactaaaaacacttgtcttgttgtataacgttgtataacaagcgcggacaaaggaataacaatcccattagtcaataaaaaagctgttgtcagccattgaacttgtgtatatgaaatttcaaaatctttcataatacttggtaaagccgtcactaatagtgtttcatttaataatccaaaaaatccacccatcagcatagtaataatcatcgttaatttttgtttcttcgacatttaaagcttccccctcaccatctaaaaaacgacacacatttttagatatccggtaattatacccattttccaaaaaattagcacgactttattacaatttctttaaaacgtaatcattactatttacatatgagtagttatcggtcataatatatttacaaggagggatagagatgaaattagatttacagactgctcgtcgtaatttaaatagccctaacattaaaacaagaaagcgtgctttaaagattattaagcaacataaaagagcgaaataattgttttaatttgactatattgtatgtctaactatattttcgagtatccctagctcgttaatataaactctatacttaactatttccttacattacttcacatatttaagagctgcatatacactcactccttgtgtacatgcagctctttttttataagtagtatttatctataacttctaaatcatccgttaattcataaacaagcggtgcacctgttttaatttcataattaatgatatcttcatctgacacatcttcaagatatttaatcaatgcgcgaattgaatttccgtgtgcagaaactaataccgtttgaccatctagcaaatattgtgaaatatgatctgtccaaaatggtatcactcgaactaaagtatctttcagactttcagaataaggcatcatacgtttatctaaatgattatatcgacgatcagctaagtaagcttcacgttgttcttcggtttcagcaggtggtttcacatcataagaacgacgccaaatatgtacttgttcttctccaaattcttttctagcatcatctttatttaagccttgcaatccaccatagtggcgttcatttaaacgccagcttttatatacaggaatccattgttgtttagattcagttaaaatataatgcgttgtatctaaagcacgtgttaataacgatgtaaaagctacatcgatggcaatgttattttctcttactttttcacctgctctagtcgcttcattaataccttgttcagataaattaacatcttcccatccagtaaataagtttttagcattccactcgctttgtccatgacgacataaaattaattttggcataacttataacctctttcctttaatctttaggacgttatttcagggatattttaagatgatttaatcttagtaattttcttttcaatatattttaaaattcaatgattaaatcaattatcactagacattaaatacataaatcctattccccattttcattttttaattcataaatgaatcaataaccacctaataacaaatcatattatacacctttgttctctatttttctaaggtttaaaaaatatttttaggtaaacctaaaaatagatgtaataaaaacgcctcctcagatatttatatatctatgaagacgtttaaatacattatagatggtctggttctgggtgaacgtatactgaggaaataccttttttgtgcaaatgatgttcgacattgtcacaaatttgatgcgcttctactaaggaaaggttagcatctacaacaattgtgacatcaataaacacactacttccatggtaacgccctttaatacttttaacttcttgtacttcatcaacttctaaaatatcattgcgatacgcttctaattcagtttcattgaaaccatcactcaacataaaaattgcttctttaaaaataccaaaaccagtataaacgattagtaagcctagtaatgttgctaaaataatatcgacaattgggaaaccgatttgcgtaaaaattaatcctatcgctgttccaatgctgactaaactatccgataaattatctttggcagccgaatttaaagaactacttttcgttcttttcgctagtctttgattgactgcaaatacaatcaacattacaagaccactgattaagctgacgataattgttattgcgttaggtacaacgtcatcttctttgaacaaacgaggtgcattttgaataactacttggatacctacaaacataatgacaaatgacaccaataatgaagaaatattttcagacttcaaatggccataaggatgatttcgatcggcaggtttaattgaaattttcaatccaataataacagctaaagaaacgataatatctgtcatattgtttaatgcatcggctcttacagctgcagagttaaagacaaaacccgtgacatacttaacaatagataagattatatatacaattaaactcaaataagcaccgcgttgcgccaatttaagattttcattatgagacatgcgttgaaccaccttgaattagtatagtaacaatattatgaatgattcattttaattttacaacgtttttaatttttataaatttttataaaattaaactaatttattcattcgcaacccctaaaaataatttttagcctttctgcgaattttatgagctagaaaggcgcccaactctccctgtttgttaactttcgcctcgaaagtttctatgttgggaccctatgcattagtagcgaagctatctaatgtgttcctttattttctgcgaattttatgagctagaaaggcttatgcagttgacgttttacgtccaactgcgttcctccgtcttcttcaaatttatttgttagaaaggcacccaactctccctgtttgttaactttcgcctcgaaagtttctatgttagaaccctatgcatgagttgcgaagctatctaatgtcgtgaactaattatatagaagaaaaagtgcatcaatgacaaattaaatgagatttctactctaccaaactctcttcgaaagacaattttctcctctatttattagcaaactattgcatttctccatatagtacttccttacttaaaatacgctgaatgttctgaattaaacgcttttttacatagttaacactagttaatctattagttaacattagttaataattagttaatttccatttgtattctcatgtgataaattctaaaagcatacaataaatttaatatgtaaaaagaaagggaatacacatgaaaaataaatatatctcgaagttgctagttggggcagcaacaattacgttagctacaatgatttcaaatggggaagcaaaagcgagtgaaaacacgcaacaaacttcaactaagcaccaaacaactcaaaacaactacgtaacagatcaacaaaaagctttttatcaagtattacatctaaaaggtatcacagaagaacaacgtaaccaatacatcaaaacattacgcgaacacccagaacgtgcacaagaagtattctctgaatcacttaaagacagcaagaacccagaccgacgtgttgcacaacaaaacgctttttacaatgttcttaaaaatgataacttaactgaacaagaaaaaaataattacattgcacaaattaaagaaaaccctgatagaagccaacaagtttgggtagaatcagtacaatcttctaaagctaaagaacgtcaaaatattgaaaatgcggataaagcaattaaagatttccaagataacaaagcaccacacgataaatcagcagcatatgaagctaactcaaaattacctaaagatttacgtgataaaaacaaccgctttgtagaaaaagtttcaattgaaaaagcaatcgttcgtcatgatgagcgtgtgaaatcagcaaatgatgcaatctcaaaattaaatgaaaaagattcaattgaaaacagacgtttagcacaacgtgaagttaacaaagcacctatggatgtaaaagagcatttacagaaacaattagacgcattagttgctcaaaaagatgctgaaaagaaagtggcgccaaaagttgaggctcctcaaattcaatcaccacaaattgaaaaacctaaagtagaatcaccaaaagttgaagtccctcaaattcaatcaccaaaagttgaggttcctcaatctaaattattaggttactaccaatcattaaaagattcatttaactatggttacaagtatttaacagatacttataaaagctataaagaaaaatatgatacagcaaagtactactataatacgtactataaatacaaaggtgcgattgatcaaacagtattaacagtactaggtagtggttctaaatcttacatccaaccattgaaagttgatgataaaaacggctacttagctaaatcatatgcacaagtaagaaactatgtaactgagtcaatcaatactggtaaagtattatatactttctaccaaaacccaacattagtaaaaacagctattaaagctcaagaaactgcatcatcaatcaaaaatacattaagtaatttattatcattctggaaataatcaatcaaaaatatcttctctagttttacatcattttttaaataattttcgtaacaaaccgtgattaaaaagaaccgttgattctcaatcgaatctacggttcttttttcattttccatcaattaaatgcttcttcgctatttgtcagcccacttttttacctgcaacttgttaaataatccttacatcgttaacgaatagttcatcatttagttgaatcagctcaactttattaacttcatattttcacaaactattgcgcaatccattccttttccactacaagcaccataattaaacaacaattcaataaaataagacttgcaaagcatagttatgtagctatataaacgcctgcgaccaataaatcttttaaacataacataatgcaaaaacatcatttaacaatgctaaaaatgtctcttcaatacatgttgatagtaattaacttttaacgaacagttaattcgaaaacgcttacaaatggattattatatatatgaacttaaaattaaatagaaagaaagtgatttctatgattaaaaataaaatattaacagcaactttagcagttggtttaatagcccctttagccaatccatttatagaaatttctaaagcagaaaataagatagaagatatcggccaaggtgcagaaatcatcaaaagaacacaagacattactagcaaacgattagctataactcaaaacattcaatttgattttgtaaaagataaaaaatataacaaagatgccctagttgttaagatgcaaggcttcattagctctagaacaacatattcagacttaaaaaaatatccatatattaaaagaatgatatggccatttcaatataatatcagtttgaaaacgaaagactctaatgttgatttaattaattatcttcctaaaaataaaattgattcagcagatgttagtcagaaattaggctataatatcggcggaaacttccaatcagcgccatcaatcggaggcagtggctcattcaactactctaaaacaattagttataatcaaaaaaactatgttactgaagtagaaagtcagaactctaaaggtgttaaatggggagtgaaagcaaattcattcgttacaccgaatggtcaagtatctgcatatgatcaatacttatttgcacaagacccaactggtccagcagcacgagactatttcgtcccagataatcaactacctcctttaattcaaagtggctttaatccatcatttattacaacattgtcacacgaaagaggtaaaggtgataaaagcgagtttgaaatcacttacggcagaaacatggatgctacatatgcttacgtgacaagacatcgtttagccgttgatagaaaacatgatgcttttaaaaaccgaaacgttacagttaaatatgaagtgaactggaaaacacatgaagtaaaaattaaaagcatcacacctaagtaaacagttcaatcatcttaaaaaatcctgggacacttcatacttgtctcaggattttttaacaaattgaatcagcctcataacattaaattattttatcgtacattaaatttaataataacaactgatttttataagaataaagtatcgaaccatagtagatacacaaataatacaaatgaaacaatttaacttgaaagcttaaataaatattatcaagttaataaacaattaatttttagatggattcatcaaaaatcgtaaaaaagcacaatttgtattttacaaacattaattaaaaaagaaagcaagacattcgtgcaatcggttaccttaaattgtttacaactgtcaacaataccaaggttttattaactatatttctcacaaaattagcttttagcattccaaacaaaaaaggttaaatcgaacggaattatggcatttttaacttaattgtaaaaaaagttgataatggtcaattgttaatgaacagttaattataataacgcccaaaatatattattatttaattaagttaaataaaattatagaaagaaagtgaaacttatgcttaaaaataaaatattaactacaactttatctgtgagcttacttgcccctcttgccaatccgttattagaaaatgctaaagctgctaacgatactgaagacatcggtaaaggaagcgatatagaaattatcaaaaggacagaagataaaacaagtaataaatggggcgtgactcaaaatattcaatttgattttgtaaaggataaaaaatataacaaagatgctttgatattaaagatgcaaggattcattagctctagaacaacatattacaactataaaaaaactaatcatgttaaagctatgcgatggccattccaatataatattggtttaaaaacaaatgataaatatgtttctttaattaattatttacctaaaaataaaattgaatctacaaacgtgagtcagacattaggatacaatatcggtggtaatttccaatcagccccatcactcggtggtaatggatcatttaactattctaaatcgattagctatacacaacaaaattatgtaagtgaagtagaacaacaaaactcaaaaagtgttttatggggcgtcaaagcgaattcattcgccactgaatcaggtcaaaaatcagcctttgatagcgatttatttgtaggctacaaacctcatagtaaagatcctagagattatttcgttccagacagtgagttaccacctcttgtacaaagtggatttaacccttcatttatcgccacagtatctcatgaaaaaggttcaagcgatacaagcgaatttgaaattacttacggaagaaacatggatgtcactcatgccattaaaagatcaacgcattatggcaacagttatttagacggacatagagtccataatgcatttgtaaatagaaactatactgtgaaatacgaggtcaattggaagactcatgaaatcaaggtgaaaggacagaattgatatgaaaatgaataaattagtcaaatcatccgttgctacatctatggcattattattactttctggtactgctaatgctgaaggtaaaataacaccagtcagcgtaaaaaaagtcgatgacaaagttactttatacaaaacaacagccacagcagattctgataaatttaaaatttcacagattttaacatttaatttcatcaaagataaaagttatgataaagatactttagtacttaaagctactgggaatattaactcaggctttgtgaaacctaatcctaatgactatgacttttcaaaattatattggggagctaaatacaatgtatctataagctcacaatctaatgattcagtaaacgtcgttgattatgcaccaaaaaatcaaaatgaagagtttcaagttcaaaatactttaggctatacatttggtggtgacattagtatctctaatggtttatctggtggacttaatggaaatacagctttttctgaaacaattaattataaacaagaaagttacagaacaacattaagtcgcaacacaaattataaaaatgttggctggggagttgaagcacataaaattatgaataatggttggggaccttatggaagagatagcttccacccaacatatggtaatgaactcttcttagctggcagacaaagcagtgcatacgctggccaaaacttcatagcgcaacaccaaatgccattattatctagaagtaacttcaatccagaatttttaagcgtactatcacacagacaagatggcgctaaaaaatctaaaattacagtaacttatcaacgtgaaatggatttataccaaattcgttggaatggcttctactgggcaggcgcaaattataaaaactttaaaactagaacatttaaatcaacatatgaaattgattgggaaaatcacaaagtgaaattgttagatacaaaagaaactgaaaacaataaatagctagtaaaacacggtcgccaacagtaattgtgacgaccgtgttttgatttattatcttagtaatactgccattctttttctcaatgtgagatataaaggaatagctacaattaaagtgaatattacgcctggaatcgcgtttaacaacactacccacacaggtaaatttaaaataatagataatagtagcctagataccaaactgcctaatacacttgctaaaactaatgatagtacatttattttcaataaataaacaactgcaatagctataactctaaatataatagagataatcacattaattggattaaatacgccaaatactagtaataataggctagataataatccacctaaaaagtactttttaattccaaagaaagctaatatcaataatgctgccggtgcagataattgaaaatctaatcctggtataatggacggtattttcaaaactgccaaaatggttaaaatcgcagcaatgacactaatttgagtaatatcttttgatgtcatactaaaacccctataccgtttcataaacaacttgcttcggtgtgctttctaaaaatgatatgtaatgatttaaatcaatacaatcgtccacaaatattattctgcctccatatctcgtattaactggtttaatatcaaataatcgatggtaaccaattttagcagcggcaaaataacctgtcgtatacgttaagtcatcggacacgcaaagttctcctttgacatacggatgcgcattgatacaactagcaattgctaaggcatcagtcactctttcattaagatcacctttattatttatatcttcaaacgaaaaatgtgttgccctaatccccctttgtccaaatgaatctaaacgtttaccagatatagcagatagaataatagctcctgtataaaccgtttcatttttaatatatgtcatcccttgatttagcgcttgttcagtgacaccacattcttgtgttaaatgttggagatttgctttatcatcctcaataatttgtaatgcttttatttgttgaatcggttccatgattttttgtatttttatattgagaaaatccggttgcccattttcatgaaaaaaacctttattataaaacctttgtaccgtctgttctattttgtcaaactcacaaatcgtttcagcaccactaatatgaacatcttgattgctagaacgcatttttatactatacatgacgatcacctcaatcttcttgatgcaaaatttcaaacaacctatctatatcttgttcagtatgaaaatacgacaatgatattcttaacattggcttagtcacagttggataccttaaataacttgtaaacacatgatgctttaataatgtttgatgaatgttctcagccgcttctatgtcatcaaactcaataaacttaatcggcgagtttgaactattataattaacattgagtgcttttaacttttggttaaaatatttactcaaactatttaatttagtgcgtctatcatcagcatttattaacttttcaatgtttctttttataaaatacaaattataaattggcaaactacttgagtagatgagtggtctaccgtgattaattaacatatccttcacatcatttgaacttaaaatcacacccccgtatgcaccacatgctttagataaactagaagtgagtatatctacaccttgataattcgagtaattctctattccaaaactatgtgaaacatcgagtatcagtgttgcgttatatttatgctttaatgagactaattgaccaatatccacaacgtcgccattcgttgaaaatacactatcagatatgattatttttggtatattttgattagggtatttctctaaccttttttctaaatcagcaatatctaaatgcttatatatcactttttctaaaccacttaacttaataccgtcaataatactcgcatgattttcttgatctgaaaacacgacacaatttgtatttttgaaaatattaaataacgccaaattagcatcataaccactatttaagatagtacatgcactatatccgagccaacctgctaacattgtttcaatttcttcataagctgtcgaacttccactaattaatcttgaacttgataagtgataactatacttccgcataaatctttcgaaatcatccttatcaaacgctatttgacctaatcctaaataatcattagatgtatagttcgtacatctcttattttctacttcaatatactgtctatctatataccctaccgatttaagcgaccgatataaccctttctgttgtaataaatcaatttgctcttgaaacttcattcttgttttccttattttcacaagtgtcataatcaatttcaaagcctaaatcattaatcatatcgtagtctaattggttcggttgcccaccagtaattagataatcaccgacaaatattgaattcgccgcttttaatgctaatggctgtaacgaacgtaagttgacctctcttcctccagcaatacgaatttctttcgtaggattgattaatcggaataatgctacgattcttaaacatttcattggtgttaaatcatccatgcttccaaactttgtgcctttgattggatgcaaaaaattaatcggaatactgtcggcatccatttcttttaaagcaaatgccatatcaacaatatcttgattagattctcccataccacaaatcacgccagaacatggtgatatattattcgctttcattagttctatcgtatctgttctatctttataactatgcgttgtcacgacgttatcatggtaattttcacttgtattaatattgtggttatatctgtctacaccagctgacttaagtttcttagcttgttcgtcattcgttaatcctaaacatgcacagatttttagttgcgggtgttgagatttaatcgttcttacagtattactaatatgatcaacttctttatcgctcggtcctctaccactcataacaatacaatatgttccaatatgattatcatgtgccacctttgctccatcgataatttgttcctctggaattaaagcatatcgctgtttttgtttaatatctcgtgattgtccacagtacccacaattttcaggacatataccacttttagcatttaaaatcatgtttaattttacttttttaccaaaataatgttttcttaaaatgtacgcctcatttaataaatctaaggtatcaatattagtatcctcataaattttcaatacagtctcttttgttaattgttccccttgtaatatgcgtttagccaaattcatattaacacttcctatctaaaatgttatgtactgcctttttaaaaatacgtaccatcgttttcacttctttatttgacatacttaacactggcacaaacgtaatgacattttctaaatttctaatcattagcccgttttctttacaattacgtacaatacgttcaactttttcaatttctaacggcgttttactatctttatctgtaactaattcaactccaaacattaagcctcgtcctcttacatcaccaacatttcgatgacgcttcagcgcatgtaactgtttctcaagtgttgatgatgtcgtttcaatatgtgacaataacttacgtttttcataaagtcttatattttctaatgcaaccgtacaaacgatttgatttccggtgtatgtatgaccatggaaaaaggtattcacaccatgcgaatcacttaaaaatgcattgtatatttttttagatgtcaatgtagctgcaagtggtaagtagccaccagtaatcgccttacctaaacacataatatccggttgaacatcttcatgattgcatgcaaacatctttccagttctcccaaaaccaactgctacctcatcacaaattaataagacatcgtattttttgcacaatttctcgacttctttcaaaaagcctttaggatgaacaaacaagcctgtcgcaccttgaatcaacggttccaatataaaccctgcgatttcatcatttctttcaattagaatttgctctatattcgttaaaatagctgtcatcatttcattttcagtatcgtaattactgcgatagaaagatgggctttctacttgaatattctcaaatattaagtctttaaatattttatgaaaggtcttgataccaccaacacttaccgcaccaatcgtatccccatgataaccgtgatttagcgttataaacttgtttttcttggcatatttttctctatcaatatttttccaatactgatatgccatctttattgcgatttcaacagacgcactgcctgtatcagaataaaatacttttcttagattacttggcgtgatttcgattaatttttccgcaagttctattgacggaatatttgatgatcctagcagcgtagaatgggcaattttattgagttgctttttaattaccttatttaagtatttgttattatgaccatgcacattgacccacaacgatgcataaccatctaaatatttattgccattcgtatcgtaaaggtaactaccctttcctttttcaatgatgattgcttcttctttgctatatacacccatttgtgtaaatggatgccaaacatattctgagtctttttgtttaagttgttgtgtgtaattcatttttaactcctattaattgttttaaaaatgcttctgagaaattttcatacgtggcatgttcttcaaatgtatagactgttttatttgttaattttccaatcgtcatttgattgtctttttcaatatagctgtctgtatagcgattcattattaaaaaattactcgccgatacattctgattaacataatcttggtgaacaatggcatcgctaatagcacctaattttgatggcaacacactgatgacacaatctgcacaatcattgattagatctttagtcatgtagaaatcatctgtaccttcatatattggtacggcaattcccccagcaccctcaattaagataaaatcaaattccttatctaaaacttttaccttatctaatacacgctgcttatttagaaaaatttgatctgtcattttaaatgcaaggtgtggtgatacaggttgcttaaaagtataaagtgacgttatgtcatagcttaaatcacattcatttttaaatacttctaaatctggaaacgtcccgtcttggcgttcctcagtttgaaatggtttaaaaatacaaactcgatgaccacgtgttttcaaagcatggtataaatgctttgtaacataggttttgcctacatcagtattcgtacttgtaataaaaatcctcataaaaataaccacctcaatccaaatgtaaacttttataattaataagtttacatttaaggcgcatgtttttcaagaaaacatgaatttaaacttctcagtataactataaattttggcaaaattttgaccttgctattgaaatgactaagacttcttaaggaattcgggcagatataaacagcgattcgataaaatatgtcagttaaaattaataattgcattatttcttaataaaaagacatcctagctttaccatcttgtgaaacaatccattaattgtaatattacgttgagcgccttgttcatcaatgctataattagttacataataaattgaacatctaaatacaccaaatcccctcactattgccctagtgaggggatttattttgctgttgattatctatcaccctttttatttccaaattctgattccatattaaactattatttataatttccagcctgctgatttactttttattcttataaagtcttgatacattcctggttttcgaattaattcatcatgactacctttttgaattatttcaccttcattgagcactataatctgatctgcatttttaatagtttcaagtttatgtgcaattgtaattactgttttgcctttacttaattcattaattgccgtttgaatcagctgttcattttcagggtcaatacttgcagttgcttcatctaaaataattattggtgcatcttttaatatcgccctagcaatagaaatcctttgcttttctccgccagataaattactacctttttcatttagcattgtttgatatccctcaggtaatgacatgatgaagtcgtggcaacatgcttgcttcgctgcacgaataatttcttctttcgttgcacctggattgccaaacaatatgttattttcaatcgtatcattaaataaatacaccttttgaaatactgcactaattttcgacattaacgtacttaatgtcatatctttaatatcaacaccatcgatgcgaatatttccatcatcgatatcataaaagcgcaagagtaagtgacataatgtagatttcccacttcctgaaggtccaattattgctgttgatgtttgtgtaggtatctcaaaattcacattctttatcacttgtttatcatcatatgaaaagttcacgttttgaaaagcgatattttcatttttaatcgtcaaattttttccattctcatccagttctggagcattttttatcttttcaatatcatctatcgtcatatctatcatttcaagtacgtgtgcagcactattaatattttcaacactatcaaatatcacaaatgaaaaaattgaaatcataataagggtaggtaaatcaatactatgattcatatataataagcatgcaactaatacaatcattattgaaacaacttttaaactaagtaaatgcaataaattgaatgggatatattgcatttctatttttgtatttatacgtttactttcattgactgcttggttaaaacttttaagactcgtattttctttcgcgaatgattttattacttgaataccacgaataacctccaataccttttccactaattggttttgtacattatgatacgctggcgcattttgtcgactctttctttctaataattgaatcgcaaaaaatgatagtaatacgccaatgcatgctaataatgatacttgccacgaaactacaagtagagacaatatgagtactgtaattaatatgtatccattaacaacaacgtccaccattttcatagcaaagttttctaaaaaggttaaatctgttgttactattgttgttaactcatttgaatgatgcgaattaaaataacctaaccttacatttttcaatttatcccctatatctaaacgttctttcgcactcatttcataagcgatgctctcatggcttttgcttttgaaatatgctgtaataaatcgtccaatcactaataaaaccatgataattacaacattcaatatatctttcatataaataggtttatgagatagcacattattaaatatttttgcagctaaaaagataggtaacgcaataaaaatagcatttaaaaatgacatgctaaatcctaaaatcattcttgctttatatggtcttatccagtttaaaattttaaatgtaatttgaaacatatttgacctccttttctcattagtttaattatgtccagtattgattccccaatcttttgtatgcatgtgcgtatcccacattttcttataattaccgtttaattttagcaataagtgatgtgaccctttttctaaaatttgttgtttacctaaaacaataatttgatctgcatgttgaatcgtagataaccgatgtgcaataacaatcaatgttttatcctgcgtcaacacatttaatgcttcttgaattttttgttcgttgtctggatcaacgtaaacagtcgcttcatctaatacaatgataggcgcatcttttaatatcattcttgcaatagtgactcgttgtttttcaccaccagacaatttatctcccactgtaccaacattcgtatcatatccatctggcaacttttcaataaattcatgacattgtgctaacttggcagctttttcaactgcctcatccgtagcttctggattgccaagtttaatattttctttaaaagtaagatttaataaaaagttatcttgtccaacaaaaccaactaaatcgttaagttgtttcgattcaatatcttttatatttataccgccaatcgtaatttcacctgaagtcacatcccagtatcgtgatataagcttggcaatggttgacttaccgctaccagatgccccgacgatagctgtgaaattattttctggtactgtaaatgataaatgcttaaagaccagatcgtccttatctttgttatatgaaaatccaacattattaaaagcaatttcataatgttgaggcttcttaaattttgttgacaatactaactcttctagacttaatatttgattcacttcagttaatgcgtattgtatagactttaaatgatttacataattagtaaaattcttaatcggtgctactacacctaaagataatacgatgcataggaaaaattccgcatagtttaattggttgatagatatcaaatacatgccgaccggtaaaatccctaaaaatgttgaaggtaatacactagctcctaaattcatatacccccatgtatttttaaaccaattcaaagtgtgaatcttataattatctactgcatctttatattttttatatgaactttgagattgattaaatgttttaatcacttcaatgccttcgataaactctacaatcgcgctattcatataattattcgatttcatttgttcagcatatgtctcattaaatccagacataacttttttaaaagcgaaaattgaaattggtatcgttactaataaggcactagccatacgccaatcaatgagcattatgtataaaaagatagcagctgacaaaagtaagtttcctataacttcaggaatcatatgtgctaaaggtaattctattgtttcaaccttatcgacaaatatattttttaattcacctattttcttagattccactacgcctaaagggagacgcattaatttttgagctaattttttacgaatttcagataaaatttcatatgccgtaatatgtgatagcatcgttgacgctccaaaacaacacacttgtgaaatataagcgattaaagcaataaagatataaaccataatcgaattaatcgtatatgtattgttaatcatcattaaaataattttaaatactgcccaataaggaactaatccagaaaagacactgatgatagacaacaaaattgataacataattttccatttactatcagaagcaaatccgctgagtatctttatccaatttgtctgattgttcatcgtatatgtaactcctttcaattaataatctaaattaagccgcttatattatttatttcactggatgatatacataatataaatttgttatttgttaaaaattaatacttattacaagtacatcatatattagttgataacgattatcaatgtcgcgtggatttgtgacacatttcttttaaaaattcacaaggttatggggcagaaatgataaagagccactaatgatttattatgtagtggttctgggagtgggacagaaatgatattttcacaaaatttatttcgtcgtcccaccccaacttgcattgtctctagaaattgggaatccaatttctctttgttgggtccctgaatatagccttgtagagtctagtacattgatttgtatcccaatgtccctataattgattattcgctttatctaatgatcctatgactcaactattaaatcatttttcgaaatacttaattctaatataattaaattcatttattgtaatattgcaaaaatacattgcacaccttgttcatcaatgctataattaattacataataaattgaacatctaaatacaccaaatcccctcactactgccatagtgaggggatttatttaggtgttggttatttgtcaccttttttattgttgcgcgttcgtaaccaatgtgcaaaaaacgcaacaagacagccgcttatagctgaagtcatgatgttaattaataaattgaacatccgtcatacacctcctctctgcgttaaagtaacgcccgagatgttaggcgaccatcatattatatcatttatttattatatttcacgcaatattaaggcttaagtaaagttttttttagtggtttacgctactttaattgctatcttttaaaatccatttagataatataaatgtgatgggtatcgtaataattaaaccagcaaatggtgcaatttctgctggcaaatttagccaggatacaaatacatataataaaactgtttgtaagcttacgttgacaatctgcgtaattggaaaactaatgaattttctccaagtaggttttaccctgtaaacaaaataacaattcaaataatatgaaatcacaaaagcgactagaaatccggtaatatgactaatcatatattcaatgtgtaataattttaacagcaataaatagacaacataataatttaacgtattaatgccgccaacaatgataaattttaaaatttcagcatgcgtttgtgttagtttcatatgtgtaactcctcaacatcaaaatatatgcataactacgttctcgaacatactcgaatatgcgagccaatccgcttcacttcaaatatgcttatttcaatctttataccctttcacagcaaatttagtctctttcccctcatccttatacgccattataatgtaactgatttatcgcgtgactcattagcactatagagattactttagttcactagtaattttatatacaataagagcgacaacagtaatgagaggatgtctactatgcaattacaaaaaattgtcatcgctcctgactcatttaaggaaagtatgaccgcacagcaagttggcaatattataaaacaggcttttactaatgtttatgggaatacccttcattatgatatcattccgatggctgatggtggtgaaggtaccacagatgctttaatgcatgcaacaggtgccactaagtatacagtcatcgttaatgaccctttaatgcgacctattgaagcatgttatgcacgcgcagacgaacaacaaattgcaattattgaaatggcggcagcgtcaggtttggatttattagaaaaagaggaacgtaatcctttatacacatcatcatatggtaccggtgaactaattaaagatgcattaaatcatggtgctaagaccattattttagggattggtggcagtgcaacaaatgatggtggtacaggtatgctaagtgcactaggcgtaaagtttactgatgtaaacggggacttattacaaatgaatggtgctaatcttgctcacattgcacaaatcgatataaccaatctagattcgcgattaaaagaggtgacctttaaagtggcctgtgatgtttcaaatcctttattgggtgaaaatggtgctacctatatttatggtcctcaaaaaggcgctgatgcaaagatgataccaaagttggatttcgcaatgtcgcattatcatgataagataaaaatgtgcacaggaaagtccgttaatcaaataccaggttctggtgcagctggcggtatgggcgcagcattattagcgttttgtgagacaactttaacaaaaggtattgatgtcgtctttgacattacagattttcatcaaagaattaaagatgcagacctcgttattactggagaaggacgcatggattatcagaccatctttggtaaaacacccgtaggcgttgcgttagctgcaaaacaatatcatattcctgtcatcgcgatttgtggcagtctaggcgaaaattatcaacatgtttacgatttcggtattgatagtgcctattctataatctcttcacctagcactttagaagatgtcctacaaaatagcgaacaaaatttattaaacactgcaactgacattgctcgtattctgaaattacaataatgtcaaagtaaatcatcagctttattatttgcagttaaaacttgaatgaggtgaaacccatgaaaagaactgataaataccgtgattcatatcaatacgacaatcaaaaccaaaatcatcgtcgtcaatctgaagacgcatcgtatagacaacaatatgctaaaggcgatcctgaagaacacccggaacgatactataatggtagagattatcgaagagaacaaattcttgaagaagaaaacgagaaatcccgccgttcaaaaaaatggttatatatcattattgccattctcttaattattgtcgctatttttgtcacacgcgccttacttaacaatgatagcgataaagttagtaatgaccctaaagtctctcaaaattataaaaaacaagttgaaaatcaagacggccaaattaaccagcaagtagataatgctaaagaaaatattaaaaacaaccaaaaaactgatgacattattaaaaatttacaaaatcaaatcgacaacttgaagcagcaagaacaaaacaaagctgattctaagctaactcaattttatcaagaccaaatcaacaaattgacagaggcaaataatgcacttaaaaacaatgcaagccaaggtaaaattgaaagcatgttaaatgatattaatacaaaattcgacagtattaaatctaaattagaaagcttatttaaagatgacaatggtggcgctaattaattattacacctgctttgatgataaacattaattccctatactttatctgtatcactacgttattcgtgatgatgcattaagagtatagggattttttatataaacttgtattctaactacatacaaatacacacaaaacgtatataatttatataattatatcatttaaaggagtctgatcatgcaatcaacgaaaaccaaaacgaagcatttttcatttttattgctaattacgttaggcgtcatgaccgcttttggcccactaactatagatatgtacgtaccatcattacctaaagtgcaaggtgattttggttctactacatcagaaattcaattaacattatcattcacaatgattggtcttgcactaggccaatttatctttggacctttatccgatgcttttggtcgcaaacggattgctgtatccattttgatcattttcattttggtatcaggtttgtctatgtttgttgatcaattgccattattcttaactttacgatttattcaaggtttaactggtggtggcgtcatcgtgattgcaaaagcctctgctggtgataaatttagtggcaacgcactcgctaaatttttagcatctttaatggtagttaatggcatcatcactattcttgcaccattagccggtggattagctttatccgtagcaacatggcgttctattttcacaattttaactattgtggcactcatcattttaattggcgtcgcttctcaattacctaaaacatctaaagatgaattaaagcaggtgaattttagtagcgtcattaaagattttggaagtcttttgaaaaaaccagcatttattattccaatgctattacaaggtttaacttatgtaatgctatttagttattcatctgcatcgccatttattactcaaaaattgtataatatgacaccccaacaatttagtatcatgtttgctgttaacggtgtaggtttaatcattgtcagtcaagtcgttgctttattagtagaaaaattacatcgccacatattattaatcattttaactattatacaagtggtaggtgttgctttaattatcctgacacttacattccatttaccactttgggtcttactcatcgcattcttcttaaatgtgtgtcctgtgacgtcaattggaccgcttggtttcacaatggctatggaagaacgaacaggtggcagtggtaacgcatcaagtttacttggcttattccaatttatcttaggtggcgctgttgcaccattagttggcttaaaaggcgaatttaatacatcaccatatatgattattatcttcattacagccattctattagtcagtctacaaatcatttactttaaaatgattaaaaagcaacatgtcgcataacacttcaacataattagaaccctagcaaagatatctatctttgtcagggttcttctttatgaattatgagatcgaatcttcaactaaaattacgccttcatagcaaggacatttctattcaatcaccctttaacaggcatccaaatttctgtaatatatttttcacttgtagtatcaccatcctgatacaactcaaaaaatggtgctgattttaccgtatctgcttgatattgatgtatgtagtgatgaacctcttccattttttgttgaactgctttaggtactgcgccctgtgcttcaaataccatatactttgaacttgctaatgttatgacatcatatttttcaatatcagcactattatctccggtaactgcaatcatatatgacatcttaccgtctaattcaggtatacataagccaagtatcccggctaaatcaccattattttttaactgtaaatccgcaattactccctcttgataacatctttgccaaaaccctgctatatgttgctgagcctgtcgtccattttcatacgtttctttaatacctactaacgttaacgacgcaagttgttgtaattgatattccattttatcactccattaattttattcactcatgtaaaacatatgtttaggacattttgcattgacgctatataattatattaaatatttattgaatcaatgcgaggactatattatgaaccgaaaaatattaccagttaaacctatcagtcagctatttcctatccctatggtcatggggtgtgaaggtgtttccgcagccatgatgttgcaatacaacaaccaacatatccctgctacagaaattatgagacattggccgacacatccgaacaatccacataaaggttatgttggacatcacttattcattaagcttggcaattatcatcaaacgatatttccagaagcatatgtaccatttttacaaaaatacaatcctaatatcgtagacggcactggtaaatcgttagaagatcttaaaggtattatcgatcaaggtcaacctgtgttaatataccatactaatcttggttctaaaccattactacgtgttttccgctttgataacaagccagcgaaacaagtttcaaatattcacgtaacgttactcattgggtacgatgattactattactattatatcgatccactttggagtcatattcgtcgtggcctagttttacctgccatcattccaaatcgcaaacaaattattaaaattcgtaaagagaaaatggaatacagctttaattcaccaggaagaaagtgcatttatgtgcaaccacattcatatacaattgaaaatcagcaacaaaataaacacacgtaagtaaacacattactcgcgtgtgtaaaacataaaatgcgcaaactgggtcaggtttgcgcattttaaatttctattatttgtatcgtctcatttatttcctggtaaatatcttctgaacgccattgtcttggatagcctagacacggacagagataacatctgccatcatctatcacacttttacgaaaatgaacatggcccataatactatatggtatatcgaacatcgcatacaaaggattgaaatcacttgtcccaataaatgcattataaaaatcgaatatacgatgcggcataggaacaatgaaatcagggtgcgtcacaacatgtgtgactaaaatcactcgtctatttcctacttctaatatatctttcttcacttgttcagccgctattttagataaattttgatctgatatgccccaagatattcgttctttatcttgccaagtcgcaccataatgttttcctttttgtaactcatctaatgaaaatcgttgtgctgcaaagctataatcataccagccagtatgtcctatgattgcccattcttcatttactataaatggttttcctaccaagcactgtgacatactcttataattattccaaatgtcttgcgtagtcatactttcaacttcccataaatcatggtttccaggtacaaatttcacaggtatatctaattgttttgtcaattgcgttataaattggtgcgtcaattgataatgatttgagatatcccccgcaatcaacaatatatccaatttcttatacttaactatttcaaccaatgcctctaagtaatcttcggatgtttttttattatgacgatcaatatgtaaatcggcgattgtccctatcttcatacccttaccttctttactcaaattaaaatgttatttattatgccatagcttatctaatatatatagttaactgcttcatttagatgattattttatatttttgcataaaaacttatatcttttcaaaaaaatcgataagttttagttatcatacccttacctatcaaatgttttttcttatatttaaaaaaataattgctttattaaatggatttctttagtatttataattaagaaaacgcttacacacaacttttttatttgctttatcctgaggaggaaaattatggcaagaaaattgcatagagagttgaataacagacacatccaattaatagcaattgggggcgcaattggaactgggttattcctaggatcaggtcaaacaatatctttaactggtccatcactgttattcacatacatgattattggggttgtactattcgcttttatgcgcgcattaggcgaattgttgttgagcaatacaagatttaattcatttgttgatattgcaaatgaatatttaggcccttttggtggctttgtcattggctggacttactggttatgttggattgtatcaagtatgtcagacctaactgcgatgggacaatactttgcattttggtatccacaagtcccaaattggattaccgtgctatttattgttttaatcttgattagcttcaacttattaggtgccagattatttggtgaactggagttttggttctcgattattaaagttgtcacaattattgcgatggttatcgttggtcttgtattaatctttttctcatttaaaacacattatggacatgcatcattcacaaacttaatcagtcacggtggcatgttccctggtggaacatttggtttcttaatgtcattccaaattgctgtatattcattcattggtattgaacttataggtgtaactgctggtgaaacgaaagatcctgaaaaaaccttaccgaaagcaattaataatgtacctatccgtattttattattctatatcggtggtctattagtaattatgtcagtcataccttggaatgatatcgatccaaatagtagccctttcgttaaactctttacattaatcggcgtaccatttgcagcaggtgtcgttaactttgtcgtgctaactgccgcggcctctgctacaaatagtggtatctattcgaatagtcgtatcttattcggactgtcacaacaagggttaggtcctaaagttttaaataaaacgaatagtcatggcgtgccttatttatcaatgttagtttcatcaattgcattacttatagcagccttgttaaactacattttccctaatgcaattcaactattcatatacgttacaacgttatcaactgtgttgtttttagttgtttgggcaatgattattgtcgcttatctaatgtatttgaaaaagcatcctgaggcacataaaaacagtaaatttaagttgattggtggtaagcctattgcttacattattctagcgttcttcttctttgtattcattttattattctttagtgacgaaacaagagcagctatttatatttcgccattctggtttatatttttatttttcttttataaaaaatacaaaacgaatgctgaaaagctcgcgtatgaacaacgacaaaatgacagcggtcatttcagatatgacaatcaataatttaaacatctcgctctagtatcagttcaaccgatactagagtttttttgaaaataacttcattttatcaatatatctatgtcattatgccttaaaagtgataaaatattaactattaaaattttgaggagtattgtatggcactattagaagcatttttaatttttatttttgctgtgattattagttcggttatcaataatcgattcccacaaattcctactgcctttattcaaattgcattaggtgtcgttattttcattattccaatacaagttgatttccaattcaattctgaagtatttatgtttgccgttatcgcgccactactttttgtggaaggtacccacgtctctcgaacaaaattattagaatatcgtaaacctatactattaatgtcaatggcactagtgtttgcaactgtagtcggtgttggctattttatacattggatttggcctgccttaccaatgccagccgcttttgcaatagcagcaattttatgtcctactgatgcagtagcagtatctgctattacacgcggaaaattattacctaaaggttctatgacgattttagaaggtgaatctttactcaatgatgcagcaggtatcatttcatttaaaattgctgttactgcattagtaactggtaccttttcattattccaagctgttgaacaatttatcatttcaacaatactaggtgtacttattggtgcaattattggattcgttgtcgttagaatacgtatagacttaaccgctaataaaggtttaaaagataacaataccttaacttttattcaattattaactccttttgtcgtatactttttagcagaagaagttcatgcttcaggtatcattgcagttgtaatcgcaggtctaatccatggtttagaacgcgaccgtttaattagagcacaaacggaactacaaatgaattaccatcaaatttggaacacatttagttatgccttaaatggttttgtatttgttgtattaggttttatgattcctactgtagtcatagatattttccaaacagagcctgacaacttttcatttttaatagtgatcactatattaatcgctattgcaatttatgcatgtcgatttgtttgggtttatttctggtacaaagatttttatttcccgaaaaatatacaatcttatctagacgaggaacatgattcacatgaaacaccaccttctcgagtgcgttacgcatttattatgaccatgtgtggtattcacggtacaatttcactttcaatggcacttacattaccatttatcattacaaaaggacaagcattcgaataccgtaatgatttattgtttattgcatctttcatggtattaattagtttaatcttagcgcaaattgttttacctttaattacaccatctgccgaagatactacttttaaaggtatgacttatcaatctgccaaaattttcattgttcaaaaagtgatccagcattttaaaaacgaaagtaaaaaagacaaaaacgatacaaattatcgcccagtattaaaccaatactatggagaattgttatttttattaaattcagaacctgataatcaaaatacaaaagaactcaaacgtttagaagatattgcaaaagtaatcgaaacatctacacttgagcgtttaattgataaaggtaaggcaacatatcaggatattaataattaccgcaatattgtcgaattaacagagacacaccgtactgcatcatttgttgaaaaatttgcaaacttcttcaagatgttatggcttagacttaaagcgatgaagcactacaaagccttaaataaagaatctaagaagcaagaatttgaaaattcattcaaagatgttcaaaaaattatgcgtattgtgaatcacaatattattttacgcttaaaagaagaacaaaatagtacaaatgtacttgaggttagcttagtcattaatcattactatgatatgagtcgctcattaaagtggcgtgcacaacgtcgaaaagaacgtcaagaaaacagcaatcaaatcataccgcaagctatgttccataaccacaaattggaagcattgtacttacaacgtcatcttttagatgaattaattcgcaaaaataaaatcaacaatatcgttgcagctcaaattcgagaaaatatcaattacaacgaaattgtcttgtctttacagtccaaacattaagcaagacataacaatacccccgtacatatgagacaaagtcattatcatctcatatgtacggggtttttatattcaacatcaaaaaatcagattgatgaaaagtaaataacctttcatcaatccgatttgattatagaatctattttttaagtttaaatggaattgtacatacgttaacattcttttgataaattaaatacaatttcatacgcaaactagtttgattgtgtaataaattatgccaacgtttcttagtaataaattctggtatcactactgtaatcatatagttttgatcgttggctttacgattaatcttatcgataaaacgtgaaattggtcgtataatactgcgatattccgaatgtaaaataactaatcttacatctgggaaatgacgtttccatttctcttggaatgctttttcatcttcatctccaaatgatacatgtactgctatgacatcattattcgcaagcatttgtgcgtaataaatagacttatcaactgctgttgtaatacttgttatcggcacaattgctaaattacgatctaccacgtccacattaagaacatcaatgtcagaacgtaattgttctgcgatatctcgataatgtttgttaattttcaagaagaaaatcaccacgaacggcaagaaaataagtatcggccatacttggctaaatttagttatgagtaaaatcataaaaacaataaatgtcacgataccaccaagtaagttcacagacaacttacttaaccaattcttaggacgttcatgaatccatttaataaccataccgaattgtgctagtgtaaatggaataaatacaccaaccgcatacaatggaattaaatcttcagtcataccatcaaatacaataattaaaataatggctaatacacctaaaataataatcgagttagagtagcctaagcgatcacctctaacagtaaacattctaggcatatatttatctttagacattgaagccgctaacatcggaaaagctgtaaatccagtgttggctgctaataccaaaatcatcacggtcgttgcctgtacaaaatagaaggcagcattatcaccaaatatttgcatagctaattgtgataaaactgtcgtttccgtttgtggcaaaattccataaacatatgctaaaccaacgataccaactaataaaaacgctaaaattgaacccatagcaattaacgttttcacagcatttttagcacttggctctctaaaattggttaccgcatttgaaatagcttcaacacccgttaacgatgaagcccctgatgaaaatgcttttaatagcaagaataatgttactccaggaaccgcagttcctactgatgcatgcatatgtggttgaatatctcctgtcgccacacggaaagtacctataaatattaatatcactaaccctataatgaaaagatatactggataggataatacggtggcagattcagttaaaccacgtaaatttaatattaaaataaaaagtacaagtaaacatgcaatcagtactttatgcccatataaacttgggaatgcagcaacaaatgcatcagcaccagatgatatactaacagcgacagtcagtatgtaatcgactaataatgagcctcctgcaagcaatccccatttttctcctaaattggtcttggacaccatatacgcgccgccacctttaggatatgcataaataatttgcctataagacataattaaagcagctaataagatcagaacagcacctgcaatcggtaaagtataccaagttgcaactgcacccactactgatagtgtaatcagtatttgttcgggaccgtaagccactgaagataatgcatccgacgaaagaatcgctaaccctttaaacttcgatatcttttcgtcttttagttctctgttttttttaggttgccctataataagtcttttaaattgattgaacataatctcctattcctttttatagtttttgatggatatcactatacgcctatctttccaaaaagtatagagagttaattaatattttttatgtaattatacacctattaacatataaggtgtcaaaaataatggtaaatatacctctttaattaatttattcaatagaactggtataataaaataaatctcattaggcacttaagtaaatttaacatataaaaaggaacgtttatgactactaaaaaactgtattttctatccatttctattatcattttagtcgccatttcaattgctatatatataacattaaatagcaatacgaagacacggttaaccaatgattcgcaacaacaaatagatacaattatcgagcatgatttacaaaagggacacattcctggagcatcaattttaatagtaaaaaatggcaaagtttttttaaataaaggttatggttatcaagatgttgataaaaaagtcaaagcttctcccacaacaaagtatgaaattgcttctaatacgaaagctttcacaggtcttgcaattttaaaattagctcaagaaggtcgattaaacttaaatgatgccgtatccaaacatgtgcctcattttaaaatgaactataatggtcaaaatgaaactattacgattaagcaacttttggctcaaacaagtggtatacctagtgatattacaagcgaagattctgtgacaagcaaaaataatcgtttaaatgatgtaacccatgcaattatgggtgatgaattacatcataagcccggagaagaatttgaatactcaaatatgaactatgatttattaggtttaattatccaaaacgttacgaagcaatcctatacaaaatatattacaaattcatggctcaagcctttgcatatgacacatacatcattcaaacaaaccaattacaaatcaaaacatgatgctattggctatgaattacaaggttcgacacctgtcgtctctaaacctgaatttaacctttgggatacaccatcagcatatatgatgacatcaactgaagatttggaacattggataaaattccaacttaatccacctgataaatacaaatcattagttcaacaatcacataaaaatttatcttcaacaattggtgaacctaatgccaatgcatatgcttccggctggtttaccaataatgatgaacatttagtgtttcattcaggaacgctagataacttttcatcatttattttactaaatccaaaacaaaattatggaattgttgtacttgcaaatctaaattcggaatatgtacccaaattagttgagcatcttaatacacaaattgtaaatcacaagcgatattcgacggttgcgtctatgctcaatcaatataaagatcaatttaatattgttaccgttttgatgacaacacttattttattagcatttatattctcagcttatcgtgcttggcaaatgcgccatggtcaaattcttttgcgtagatcaaaacggattgctgtattgagttggttatcattatgtatatgtatcgctttagcgctcatattatatgcattaccatatctcattctcggtagcaataattggtcttttgtactgacttggctaccaatagaaattaaattagcactaatcacaacattaattgcattattcagtacattaattgtaattctgttattccttcatacaaagataacgaagacataataaaaaagacttgttcgagccgtgcgtttgataatatatcatccacgattcgaccaagtctttattctttgtatattaaacggataaattattatttaattggattcatgccatctttccaagtttgataaatcagagtaccaccttgcgctttaaacttctcattgcttacgccacgttcaaatggttgcgcaggttgaatatcaatatttggttcaacaccaagttgttctttataccattctgcaaattcagaacctttaacaggtgcatcatctgctacattatagataccattttcaaaatgaatagcttgaatagatgtttcaactgcatcatcaagatgcacaaatgatgttacgccatctgaaagtgtcacttgaccatccataaattgattataaatcatgccatcttttccgtaccaagtacctgggccatataaccagccaaaacgtaaaacaacgtattcatccatacgagccgtttcttcttctaaaccaaccacaccatcaaccgttacttttctatcgccagttgagttaaaatcaagtgaagtttcctcatttgctaatccttcgccaggttcatacataaaggcaatactttgggcaattactttcttaacgtcatgctttttcgccgcatcaattaggtttttagaaccttcaatacgtactttcgtatttgctgccatatcaacattttttaaatccgtaatttgattgataatgatttctggtttaaaatctgctaacgcttgatcaatagtatcagcttttaatatatcaccaatatatgcttttacattaacagcagctagcttttgttgaccattctcagatgtagtaaaaccagcaacctcatgcccctcttcttttagtctttgaactaatttaatgccaataaggcccgttgcaccagttacaaaaattttactcattataaacaccttttctctatttgtctttttaatataattacttgcttgatgagtttacaaaattcacgtgagacttccaaatgatttgcctcaaaatttttcaaagtgtcgtcgtaaaaactgtctagtaaatactaatagtatgtcgtagacctatgacaaatctgaattatgacgaagatcaatcaagaaaaacagcaccaagatcatttcaatttgaaagtaccttactgctgttctttatttattacatttcaatcttaataatgaccgtaatatcacgtgattgtcatttccttgtaatcatacctaaaacaccaattaatcctgtgcgtgtcgctgactttctttagtatgaattaaatcagtaataaagcgattgactggcgcttcaatatgacgttgtttacctaatgttgcaactgcgccattaatataatcaatttcagtttttctattattaacaattaaatcttgatacatggatggataatgcgcaccaactttttcatttaaatcaactaaatattcaaatacttcatcaacatttaaatgaacattatcaatcgtcgctacatgcactatttcttgcgttaatttataaatcaaacacttcgcataactactttcattcagcgatgccatattacactccaacactgtgcttaatgcatttgccgtaccattaacacaaatctttttccaaatcgattggtataaatctttactaatgacaccattcaattccgcttcgttaagtaaatcagcaacttttataacattttctttaccttcatccactagttcacctatttcaactggtccactaccaagtaaatgactgtgtccagggctttcaagacctgccgtccaagtcgtaacacctctgacaatttgtgattgagcaacatactgcgcaatgacttcttcatgcttcagaccattcatcgtacatacgacgatcgtttcattatcaatatgtggcttcatatcttccatcacttcttttaattgcatagactttggaaatagaaagacaacatcgtaaatgctttcgtccggttgatcattaaaatgatacatcggaatgtttaactcgaatgcctctccattaatcgttatatttaatccatgttgcttaaccgcttcaacatgagatgtatatccgtcaataagtgtgacatcatatcctgcttgaaatagtttggcaccaaagccactacctaatgcacccgatccagcaattgcaattttcatcctataaacccctcttcatcgttgttgttcattttaaaaatactactttcgcatattagcgtcaatttgaaaatcattcgcttaatatgcacacagcttttatcgtctataaaagaacacacctaacattaaacgtcaatacgcaacattaagtgtgtatgataaacttactttcacaaaatttcctttaaaatccctacataataacttgctttcatttcagttttacaaattcgtttgatttttaggaactaatagtaaaatgactaaaaatgcaacaattgctagcaaggcattaaacatcatacctgtgaaaccacctaagttcaaatttaaattagctgctaacacagtataaaccgtaccagatactgctactccaaatgcatttcctaatgatgacgccattttatacacacctgaagcaacacccgacttatcatctggcgcactagcaactgctgtatcagttgatggtgtagcatataatcctaaaccagtaccaaacaataaatatccaactatactagatatgatataccacacttctggtaaaaatgttaacgacaataagattaacccaatcactgtaaagccacttcctagtaatagtgggcgcttcggaccatgttgagataaaatcttttcacctacacgaatcattgacaacactgttattaaatacgttaatgaaatataacccgtttgcgaagaattaaatcctaattgttgttgataatacgtgttaataacgataagtgcaccacctgctacaccatttaataagaagtttgaaatagttgcaccactgtatcctctatttttaaaaattgaaaaatcaacaagtggatgctttattttattttcgtaatatacaaaaccaactaatgaacagataaacacaacaattaaacctagaattaacggtgaaactaaaccaaaatgagacgtctgtgtgatgattacatttaaacttaacatcgtcactactaaaatgactaaaccaataacgtcaaactttttagcttctgctttcatacctttgattggttctgctttagtctcaggtgcatgtttgattaagtacattgctaataatgttaatagaattgaaacaacaaatattgaacgccaacctatatatgtagccattaagccaccaaacaacgtacaaataccactaccaccccaagaaccaatagaccaatagcttaaggcacgttgtcttcttgtaccaatataatattcgttaataatagcaagtgttgatggcataatacatgctgcagacaaaccttgaattattctacctataattaaaaatgctggcaaaggtgtaatgatgatgagtaatgaacctacaacatttaatatcaatcctacataagtaattttgacgcgaccaaatttatcagcaacatcaccagcacctacgataaacaaaccagcaaataaggcagataagctaacagcgatatttatcgttccaacgtcactactatatgttgattgtaatgggacaacaagattaacaagtgactgcgcgaatagccaaaaggtaataacccctaaaacgatacccaaaagcaatcggttgtcacctctaaattgttttgatgtgtccatgaattagataagcctcctatgtttaagaaaaacaaatttttaatatgatatattaagaaacaatatcataaatttgcagaaaattataaataaaacatctcattttttagtatttttacaataattaacgctttttatccaaaaactttcatgataataattgctattttagtgtaaacgcatacaaacacaacctataaaaaggctactcaaagattatttgagctccttgagtagcctcattttttataaatcatgaaacgaaatcgctaaattataaacatcttctactattacatattaatactttgcggccgatgattagattgatttttacgatgtcgtgttgttgggtctaatcgtttttctaaaaatcttaatagtacatcaatgacgattgcaatgatagcaatcggaatcgcacctgctaaaataaacgttgtgccatccgtcgcatttgtaccacgaatcacaatgtcaccaagcgtaggtgctcctataaatgatccaacggcaacaacacctatcgcaacaaccaaggcaatacgaatgccaccgataataaccgaaacagataacggtaattcaatcattcgtagcacttgattgcgtgtcattcccatacctttgccagcatccttaatattcgcatcaacactagctataccagtataagtgttttttataattggaagtaacgcatataaaaacactgttaaaactactgtttctgaacctaagcccatgactaacattaaaatagctaacattgcaatgactggaactgtttgaattatatttgcaattgtaattacaaatccagaaagttttgtgtatcttgcaagcaagattcccaatggaataccaattaaagctgcaaacagcacaccatagacagacattaataagtgtttgaaaaataaatcccatagataaccaaagttcgtaacataataattgaataattgctgtaataaattaccttccattacttatgaccacctttctgtttatcaaaatagtggtgttttttcaaaaattcttctgcgacgacagcaggttctttacctttaccatccgcttcataattcaagcgttgcatctctgaagtcgaaatctttcctgtcaacttattaatcgtcgttttaagttctgggtgttgccgtaataattcatttgttgcaacagcactcgcagcataaggtgggaaaaattgtttatcatctttaagtactttcaaatcatacgccgcaattcgaccatctgtagaataacctaatgcaacgtctaacttctctgagtttaatgcgtcgtagactagacctatttgcattggtctcactgtaccaaagtcaaaaccatactcttttttaaatccttcatagccatcgcctttacgattcatccatgaactatccatacctaaacgtaaatctttactatgctttgctaaatctgaaactgtctctaaatgatattttttagcggtttccttcgttaccatgaatgcatacgtattcgcaaaaccatacgaatcaaaaaacgtttgatcaaatttctttttaaatccttgttgtgttgctatcattgctttcttaggatttttaattggtgcttccttcaaagctcccgttaaatctgtgccattatatctaacacctgatatattagcatccccattaattaaggcattatgttgaatcgtacttgaccctaaattatttactaatgttggctttatcttaccgtgtgtatcatgctctattaacaaccgtaacatatgtgaaataatttgcgattcgcttgttgataatgctgtaattttgacatcatttttcgtgctcttactacctagtccgggcaaactacatccagataatacggtaagcgataagacaaacacgacaagtatatatttaattttcttcattatcttagcctcctaattatccagatacttttaagcctttgggaactacccatttttcaactaaagctaataaggcatcaacacctaatgctagtgcagtaacgagtaccgttgcagttacaatcatcagtggatcatataaatttaaaccattgaaaatgaaatcacctaatccacccgcacctacataacttgcaagtgtagcccaactaattacatacacagatgacaaacgaatgccaccaatgataagcggcaatgctaacggcaattcaacatccttcatcaattgaaattgtgtcattcccatactttttccagcttctttaatgttgctatcaatattttgaacaccgagtaccgtgttatttaaaataggtaataatacataaataaatagcgctacaattgcaggcgttttaccaacaccaaaaatcggtatcataatagcaagtacagctagtgttggaatagtttgtaagacacctgccacagttaatacaatattggcagttcgctttgtttttgataataaaatgcctataggtactgcaacaatgatggcaagtaataatgccactatagaaatatagaaatgttccagtgttttcgacatcaactgtccaccatgttcatgtaggaactcaatcatgatttatcatctcctatgtcacgtactttgacattagtagtgtgttgctcatgcacttttgaggacgcagtgtcttcccccacatgttctgtttgcactgtatcctcactatcgccccaaatcgtgtcatatacaatatcaacaacattggcacgcgtaatcagtcctactaaacgctgttgatcatctacgacaggtacattcctaacgtttctttttaaaatcgtacgtacagaatcttgtaatttagaatcaatttgaacggtataaatatgttgttgcatggtgtctcgtaaacttttgtgtccacgtataccctgatttatatcttcaatgtctaagaaacctagtaaatggttattactatctactacaaaaatagtatcaacacgtttttgtctcataatatgaacggcgtcattcagtgttgcttctgcttgtatcgtgattggtttaatcattacaccttctacagtcttgtcattgggacggtcttgaatcagtctattttgtcctataaaatcacgtacaaaatcatttgcgggatgtcttaaaatattgtctggcgtatcaaattgcaccaccttaccttctgacataatacaaattttgtctgctaatttaatcgcttcatccatatcatgtgttacaaagataaacgtcttgcctaattttcgttgtaacgttttaactaaatcttgtaacgtatctctcgtaataggatccaatgcaccaaaaggttcatccattaaaataatatcttgttcggccgcaagtgctcttacaacaccgatacgttgttgttgcccacctgatagttctgctggataacgctctaaaaatgactccggtaaatccacaagtttaattaattcctttgcacgtttatccttttcctctttagtccatttcaacaatttgggtaccaacacaatattctctttaatcgtcatatgaggcattaagccaatttgttgaataacatagccaatatttctacgcaattcgacaggattcatactccgaacatctttaccatcaatttcaatttgtccttctgtcgcttcaatcatacggtttatcattcttaaagcagtcgttttgccacttccactggttccaataaatgcgataaattccccagattgaatatctaaagagatgtcatctactgcctttttattaccagaataaattttcgttaaatgcttaatacttaacataatcatttctccttcctcataaaaaatatgacgaatgatacgcataaaataaaaagaccattatcgcaattgttaaacaaatagagtcataagttaaacaagtacacatcatggtcttgattatgtagaattttatatttttcatctgtaatgtgaatacttaacagtaaacggcgctatgtatgttgaatttctaccgattactttgtttgcacattcgtatattcgacatttaaaactaacatactctatatgatgttattaaacattattattttatctttggcaactaaatagataactcatattttttaaaagcgaatttattatcgctcaattggttgttttatagcaaaaaagtgtcgaaaatgtgaaatattattacaaaagtcgaatttttgtaataatgcacacgcatccattgttacagacggacaaccgcccatccgccactcacaaagtcatccttatattttaatatcttcatcattcattgtagacacccttgccttttgctaacattttctactcccaagcctgtaacggaattccaacgtcaaagtgttgcccatgacagacacacctaaaaaaacaaccaacagcatgagccattggttgtttcgtgtcatcttgtatgttgttgtataaccggtatgctttactcattaattacttatcatgcatccctttaccttctagtatttggttaatatacttttcaacacgcttttgtcttgtttcactgcgtttagcttgtccaatatgatatatatattgatgttgtctgcctggcgttaatttataaaatgaagactctaactgtggcatttcttcgaacttagcttctaactctttaggaataacatattcctctgttttcttcatttcaacttttttaccagctttttcagctttaattgcttcggctagataatatttaatttcttcggtacgtgcttgaatctctgttaaattttcaaatcgtaactgacgagctgcttgcaccttttcagtctgttgaatgagtgtatgatatttatcctccaaaatggcacctttatgaaataatagtgcaacataatttttgaagccatggataagtactacatttttattattcaacgtgtaacaaggatgcatccatttatacgcttcctctaattctgtttcattaaagattaacgctctcaaatatttatattcttcttgccattgactctctttatttaaaaatgcttcaacttgttcatttgattgtttctcactcatagtcatcacttccattttgtttttcaatacacattgtattatatatcctaattttataaaaaactaattttacaaatgcttttgcgttcttacaaaaaatgcatttgactattattataataagcgtataattgtcgcatattattttttgtatttttggcaataacgaaggagtatttatgaataaagacaagcaattgcacaacgacaaaatcaatctatcccaattagtcttattagggttaggctctttaataggatctggttggctatttggtgcgtgggaagcatcatcaatagctggaccagcagcaatcatatcatgggttcttggattcctagtcattggaaccattgcctataactacattgaaatcggcacaatgtttcctcaatcaggtggcatgagtaactatgcccagtatacacatggctcattattaggctttattgctgcttgggcgaattgggtgtctttggtgacaataatacctatcgaagctgtgtcagctgttcaatatatgagttcttggccgtggcattgggcgaaaccaatgagatatttaatggaaaatggctctattagcacatacggattgctagctgtatatctcatcattgttattttttcattattaaactattggtccgtaaaacttttaacatcatttacgagtttaatttctgtatttaaattaggcgtacccatgttaaccatcatcatgttgatgctatcaggattcgacacttcaaattacggccattcggcaagcacatttatgccttacggaagtgcaccgatttttgctgcaacaacagcatcagggattattttttcattcaattcattccagacaattattaatatgggttcagaaattaaaaatcctgaaaaaaatatcgcaagaggcatcgctatctcactgtcaatcagtgcagtgttgtacatcattttacaaagtacgtttatcacttctatgcctcaatcaatgttacaacatagtggatggaatggcatcaacttcaattcaccatttgctgatttagctatcttattaggaattaattggctcgcaattttactatacattgaagcttttgtatcaccattcggtactggcgtgtcatttgtcgccgttacaggtcgagttttacgagcaatggagaaaaatggacatatccctaaatttcttgggaagatgaatgaaaaatatcatatcccacgtgtagcaatcatctttaatgccatcattagtatgattatggttacattatttagagattggggtacgctagcagcagttatttctactgcaactttagtagcctatttaactggcccaacgacagtgattgcattaagaaaaatgggaccaacaatgactcgtccatttagagcaaaaattttaaaagtaatggcaccattatcatttgtattagcttcattagctatatattgggcaatgtggccaacaacggctgaagttattttaatcattatacttggattaccaatctacttcttctatgaatatcgtatgaattggcgtaatacaaagaaacaaattggtggtagcttatggattattgtatatttaatcgtgctatcaatactgtcatttataggaagcaaagaatttaaaggcttaaatatgattcactatccatttgactttatcgttattattattgtggcacttatcttctattacatcggtacaacgagttcatttgaaagcgtctatttccgtcgcgcaacacgaatcaatacgaagatgcgtgagtcactaaataatgaatcaaagtcatctcattaaatattttaaaatacagtgccatatatgatttcaacacacacacattaaccaaccattgatttcaacatcttggttggttttttattttgaaaatcggttataaataactaacataacaagatgatgatcaggctgggacataaatcaatgttctatgctctacgaagttatattggcagtagttgactgaacgaaaatgcgcttgtaacaagcttttttcgattctagtcaggggccccaacacagagaatttcgaaaagaaattctacaggcaatgcaagttggggtgggacgacgataaagaaatactttttctatagaaattagtatttcttatgcatgagttttactcatgtattcatatttttaagtacacattagctgtggctaatgtataagaaccactacataataaatcatttgtggctctttatcatttctgtcccactcccgtagaagtacatcatataatgctgaaaatggtttgagttaaaacagatatcaagctcgtctgattcagtcacaaaattgtcttgttatacttgtcacctatcatctatagaccgtggtatgattaaattggggatgataaaggaggttaataaatatgaagattaatactacaggtggtcaaattcatggtattacacaagatggtttagatatcttcttaggcattccttatgcagaaccaccagttcatgacaatcgctttaaacattctacgttaaaaacacaatggtcagagccaattgatgcaactgaaatacaacccatcccaccgcaaccagacaacaaattagaagattttttctcctcacaatctacaacttttactgaacatgaagactgtttatatctaaatatttggaaacaacataatgatcagacgaagaaacctgtcatcatttatttttatggtggtagttttgaaaatggtcatggtacagccgaactctatcaaccggcacatttagtacaaaataacgacattatcgttattacatgcaattatcgtttaggcgcattaggatatttagactggtcatattttaataaagattttcattccaataatggcctttcagatcaaatcaatgtcataaaatgggtgcatcaatttattgaatccttcggtggcgacgctaataacattactttaatgggtcagtctgcaggcagtatgagcattttgactttacttaaaatacctgacattgagccatacttccataaagtcgttctactaagtggcgcactacgattagacacccttgagagtgcacgcaataaagcacaacatttccaaaaaatgatgctcgattatttagatacagatgatgttacatcattatcgacaaatgatattcttatgctgatggcgaagctaaaacaatctcgaggaccttctaaagggcttgatttaatatatgcgcctattaaaacagattatatacaaaataattatccaacaacgaaaccaatttttgcatgttatacaaaagatgaaggcgatatttatattactagtgaacagaaaaaattatcgccgcaacgctttatcgacattatggaattaaatgatattcctttaaaatacgaagatgttcagacggcgaagcaacaatctttagcgattacacattgttatttcaaacagccgatgaagcaatttttacaacaactcaatatacaagattcaaacgcacaactatggcttgctgaatttgcatggcatgatacttctagcgcacactatcgcagtgcttaccatattctagatatggtattttggttcggaaacttacaaatattagcagcacatcaatatccaacaactgctcaccttaaatttttaagtcgacaaatgcaaaatgatttagctaattttgctaaaagcggtaaaatgccttggccgatgtatcataatgaacgtcgctattatcgcacatatcaataacgttatcgcatctaaaaaagcacacctgaatttgatagcaggcgtgcttttcatatgagaattatgatgatttaaatgttttagcataatgattatttttcaatgtgaaaacaacgattaatcctaatgcgccaatgatggcactcgtatatgtgatagcttgaacagaaacatgtgtcatgaccaagcctccaataatgcctccaacaccaataccagcgtttaaactagacatgttccaactcattacttggcttgtgtcgccttcaacatgttgaatcacaccgctttgcactgctggattagtactccattgcatgatattccaaataaatagtcctgctaacaatagacctgaaccaggtaagattaaattcataagtaacatcatgacgataaaaatagaaacagaaatcattaaccaacgcttacttgtaattttatcggagaatataccacctaatgatgttccaataacgccagcgattccatttactagaagtgctaatgaaacgaatgacatatcatgaccattagataaaataagtggatttataaagacgaatgtcactgagtttgcaatcaatactaaaaacgtaataattaaatattttgctacttcagcaggtcttaatattttcgaagtaacatgattttcatgagatggtgtctcatgattcacagggcctcgttgtatttcctgatccttcggtaaatagatcatcatcaagaagccaacaataatactcacaataattaagaatagaaatgtatagcgccaacctactaaatcgccgataaccgttccaattggtacaccaaaaacattagcaccactaaaccctgtatagacaagtccaatcattttaccacgatttttaggtgctgataacatcgctgtaatagctaatacttttacgataattagtgctgctgctgcagatgagataattctaccaactactaatattgaaaaatttggcgctacagcaataatgccattaccaatgataaatataagtaatgtccataataatacaggccttgatgaaaaacggttcgttaatttaaccagaataggtccacatatcgcaaatgttaaagcgtacattgtcactaattgaccaacgacagcttctgatacatgtaagtcctgactcatcaagttcataattcctgcaaccatcatttcaaccattcctacgataaaaatacttaaaatgaatgtaaatagtcgcatgattgacaatttaaaactcctttcaaacaaaatttccgatattcatttcccttagaataacgatttattaaaaaatgtgtgcaacacaattttatatataaccgttctattatataatattttgctttaattttctgtgcttaattggaaaattattgaaattgtttttcagtatttgaaaaattaacacaagtatgtcatttaataattatgtataattacttcagtttcaacaataactccaaaaaagcacgcacgctttatatgtcagaacagataactgactacaaagtatgcgtgcctttatgaatattttcgctgcgctaatgaatagcgatactatatgtgcgcgtcacttcatttccaattaaaactaatgcctaaatctgatgcagtaaaatctatcatgattcactcttaacatcagtatttcgtgctactaattgatgtcttgcattgaaaaattgaccatagcttaaatatgtcgcaatcaaagcagacataatggtcgcagttgtatgaataaacacgactaacaattgaaatttaatcgcttgtaaaggtggtacgccaccaataattaagcctgtcatcataccaggaatcgacacaagcccatatgttttaaccgaatcaatagttggcactatagctaaacgaatactttcacgtattgcacctttagaagccaatttaggtgtagctgcaagtgataatttagattcaatattagtaccatcttgtacgaatgcacgatctaaattctggtaagctaaattaattgcaatcaagccattatttgcaagcatgccgccgataggtataacttcatttgcggtaaattgaatggcccctgtcgcaatagtacctgcaagcggtaatgccgttccaatgaagatagctagaaatgatatccaaaacacatgatgcatcactggtgatgctcgactaattgtattccatgatgcattaataataatgaccaatacacataaaataagcagccatttatcgtttattttaaaaatataatgcagcaaaaatcccaaaatgattaattgcacaactgctcgtaatgtcgcaacaattaaatctttaataatatgtaaaccttctttatatgaaatgataatcggaatgactaaaagcaatgccgtcaatccaagtgccgtattactcatgttgattcaactcctctgtattagaaatttgaccatcaacaattgttatacgcttttgaaagtgtcgcatactttggtcatcgctgtgggtaatccacataattgccacgccttgatctgctaatttaaaaatgatattttctatcttttctttattattaacgtctaatgcactggtcgattcatctaataaaagaatatccggtgtatacatcagttggcgcgctatagcaattctttgccgctcaccacccgacatattttccacttccgaacttaattgataatgtcccaaaccgacatctttaattaattgctttgcacgttttctatcaaatttatcattacgtgcaagtgatgggaatatcatgttatcttcaatcgtttcaccaaacaagtcactttgctgcatcaaataactgattcgttgacgcaattcttccgggtcataatcattatagggtttacctttaaaataaagttctccactagttggactaaacaaattacatatttgcttttgaaatgtacttttaccactacctgatggacctataatggcaatactctcgcctttatctacttttagactgatatgatctagtatgattctatcgctcgctttatacactaaatctttaatttctaacaacatttgcaccgctcctcatgtaatatatcaggtatattattcccgtttttttggtttttagtgcaattacatttaagaaaaaatcattttcttgtaatatcaaaatttaggcataattgattttcagcatttaaattaaaaacaaaaaatcctattaacatggatactgtctaatgactaagaattaaaattagacaattgtttaacaacctaccatattaaaaggattctttattatttatggatttgattaccacatgatatttttataactttcatcattcaatgaacggacaatttcagtaacaagacggatagaattttcataatcatctacattgagcactgaaacattagaatgcatgtatcgcagcgtaacaccgattgtcatcgttggaataccttcatttgcgacatgaatacttcccgcatctgtacctccacctggtgtcgtatcccattgtacttcgatgttatgttccttagctacatctttaatatgctttcgcaaaccttggtgagcaatacttgtagcatccatcataatgacaactggaccaccgcctagtttactatcgctcgtttgacctgacatacctggggtatcataagcaatacctacatcgacagctatcgccaagtctggtttaatcgtattcgctgccactttcgcaccacgcaaaccaacttcttcttgcactgtggcaccactgtataagttaatgccaatattttcatcttttaaacgttttaatacctcaatagctaatgcacagccatagcgattatcaaatgctttcgcagttaaatatttatcatttgcaagcacttcaaattcactatatggcgtaaccatattgcctacttcaacgccagcttcttcagcttcttccttgctactaacaccaatatctataaacatatttttgatttccattggctttttacgttcttcaggcgttaagacatgtggcggtttagaaccgatgatacctctaatttctttgcccgaatctgttgtaatcgttactttttgagatagcatgacttgattccaccatccaccaactggcgtaaatgaaataaaaccatgtttatcaatctttgttaccataaaaccaacttcatccatatgaccagaaatcataattgagtattgaccattctcagcatttttctttccaaaaatgccacccaagttatcttcaataatttgatcactgacaggctctatatagttacgcattgcttctttaacttgcatttcataaccagcaatgccgtttacatctgttaaatgtttaagtaatttgactgactgattcatgttattcatcctcctgtatttcaacttaaaactattgtatcactaactttcagaaaaacgttccctaccgctttatcattttcaggcttaaatatttttaaaattttgtgaggaatccgcttaaaaacctcatatttctaaaatttaatattccgaaaaagtcacaatttaaaattccttattataatacgttattcttttattgttactaatttcaatctgtttagtcttgcgctattataaaattaaaaagtgtagagataacaacgcattaacgtcgctattttccctacacttaaatactagtttctttaattaacttatcattaaagttattcagatattgaatattcattaatcataatgtgaccatgccgatagtattaatacttctttatttcgatcatctacggtatagacgaccctgtgctgatggttaattcttcttgaatatcgctctaaatatttaggctctaatttttcaaaagattgtgttattttatacggatcattttttaaagtctcaacaatttctaaaaatgacttctttaaataagaatgttttattttctttaaatctgatttcgctgaatttttaatcttaaccgtgtaattgctcattaaagattatcccaatcaatatcatctatatttgttgtaccactattatctttttctctttctcttactttgtccattgtaccagtagattcaagatatattgtctcttgtatacttttccaatcttctaaacctataatcacagcattattttcggcattattgccactaatataaattggttcgtgattattattaacattttttagtaattgataaaaatcttttctcgcttctgtagggctagtgataatcatataaaccctcctttgttttctgttacgctaattatagcgtacgcacttgagtacgtcaatattaccaacgagttcatcgtattcttaatacctatatgctatcgttcacaaacttttgttcttttcttccaacataccgcctataatgctcaaaaagaaatcagcagtggaacacactacgttccctaccgctttatcattttcaggcttaaatatttttaaaattttgtgaggaatccgcttaaaaaaactcatatcttcaaaaaaaatgacaaaatttaaatttttgaataacatcattttttagtaaatgttataatttctttataatacaaatatcgaaagaaggcgactgactttgaaaaaattatgttcattaattgtagtagcattagtttgtatcattgcattatcagcttgtggtaaagaacaaaccaaaacatatgaaggtgatgttagtggtaaacatgtactaacttctatcacatataaagatgataaagttttaaaacagtctacaatcaacacaattaaatatgacgatctaggtatggataaagacgaagccaaaaagttattcgccaaatctgaaagtattttcaaagaccttaaaggcgtaaaatacaaagtagactataaagataaaaaagcaattgaacacttagacatagattacacagaagttgacatgaaaaaattaaataaacgtcttggtgtttcgactaaagaaaataaagatattagttttgaaaaacttgaaaagcaattaaagcacagaggtttaaaagaaaaagataaaatggacgacaaatagtttataacttaaaaatgccctcagataagactaaggttacaaaccttaattcatattctgagggctttaatatttgaagttcttgtgtgaccagcatccactactaatataaaattatttgcagtaacgctaaaatccgctgctttcaatttcccgaaataattaagttaactaatgagttttaatttataatcatgtatcgtttgtaactcaccatcgacttttcgatatacaatatgatcagcagtaatttctgtaggactggatacgccaacagctgctgcaatattgaataagccttcatgcaaacttgttacatagtttgtgacacgatattgcttttctccaacaatcaatgctttttctttcttcgcatctgtcgttgcaacacctacaggacacgtattcatgtgacattgttgactcattatacaaccgacactaatcatcatcccacgtgcgatatttacaaaatctgcacctaaacctagtgcaatcgcaattttatctggtgtcactaacttaccagatgccgccaatttcactttatctcgaataccatatttttctaacatgccagacacaataggtagagctgtaaatagcggtaagccaacaccatcttgtaattcttggaatgttgcaccagtaccaccttcaccaccatcaatcgtaataaagcttggatacttatctagttccaccatcgtacgtacaagtgtttcaatttctgaaactttgcttactacaattttgaatcctactggtttttgacctaattgctgcaactgatcgacgaaacgaatcaaatcttcagcattatgaataaattcgtaacggttaggtgaattgattgttttataaggttcaacatttcggattttagcaatttcttcgtttaccttttcagcttccatatgaccaccacgagtcttagcaccttgtgccaacttcagctcaaatgcgcgtacgttagataactgtgcaacctctttaaataaaccttcactaaaattaccttctttatcacgaacaccaaataaaccgggaccaatttggaaaatgatatccccattaccttttaaatgatattctgataagccaccttcacctgtattcatccaagtgcccgctttagctagacctttagataaagctgtaatggcattttttcctaaagcgccataactcataccagattgtcctacgatacgttttaaaataaatggatgttttaaatgttcacctaattttattgcatggtcatcacttaagtaatacggatcaatctttgtcggcacacgatattcttcacgactaaataaacgctcattcgcgattttataaatgaatgttgataacaatgttgtattatctactgaaatctcattacgttgcatcggaaacattgtgttctgtatgtaaaagccgtcttgataatctttagtagtaccgaagctggtcatacgagagttatattttccagccaaaacgatatttttataatcattacgtgaaaaaggtttcccttcattatccccagaaaataaatactgacgtaattccggtcccattttttctgaaatatatctaatacgtgctagtaaaggataattccttaatacactatgttgtgattgtcttttatctttaattaaccaaataagcccgataacaataaccgtaagcatgaatcctacaacgataatgttaactataaattgcatgactgtaagaaacgtcattacaatacctccccccaaaatttcaattcaatatttatgatacaccttacaaaacaaaacacaatggaagcgcttcattttataaaacaattttatgatatgtttttcattttaaattttaatgtataaaacatacaatacaaagtaatatgtgctaaagtatctatataatacaactatttaagaggtatactatgtcaaatacaaataaacattacatagaagaagaatacgctaccgaacaatcgcgttttttcaaacgtgatattggatttattttcctttacatatttttggttaacatcttgccgatcattatcgtctttttaacttttgggttagtagctgtattcactcaacaagctccgtggggtttctcttttcctatttcaatgaacattagctatttactcgcagttattatttcactagctatttttcgtctgatgcatgaagatgcgtttattccaatgatacgttcgcaaatcgttgctagtgctaaatataaatggcatattcttatatcatttacactaagtgtcgtactctttttacttttaaatcatttcaatattttcgcactaaatgtagattcctttactgtctttgacatttacccgctcattaaagggtatggttccatcagtttaatagctatattttcgttaaccattatattaaatactttgatttgtcaacttattttccgtcatattttaattcaagaattaagcagattaatacctttaaagattacaatagtattgtccattatccttgaaactctgttctactatccatacattaatacatggtgggaattcattccagcattgatactagcaggtagtgcgacttacttatatttaaaatcataccgtaattttatggtgagctatttctatcaattagcagttatactcgttttgcatattttcatgtaaaatttttcagagtattatccattatccatacacatcaaaaagcacacttaaaagtcagtatcaaaactcacttttaagcgtgctttatttagatatactgtcgttctaaaaacgagccatatagaatgtttcatgtcctagcatgaagcacatgaatcgccatgctcaatataccttttaaaatttaaatattcattaacttaatatgctttaattcacttcattaaagactactcgctggacgtggtgttggctttttcaagaaactcataatcattattacaatgactaacataccacaaattagatacatccatttaaatcctactaaatcggaaataggtcccatcaatgcgccacctaacgatatacctaagtctgcacaggcaataaataaacctaacaacatattacgacctacttttggtaagacgaagcttaagtatgatgttaatgttgggtacaccattgcttgcgtcattcctattaatatcgcactaccatagaaaataattgcacctacttgcggaccaaatgccactacaaatgacgcgattactaataatgatagtacagataccatatatttaggatgccacataccatctgacggaatgtatttccttaagtaaaatcttgccgcaacaactgcgatggcctgtattgtcaaaaagattcccgcattcgcgaatcctaaactcactgtgtataacggtacaaatgtactaactgcaccaaatacaatcgatgcaacaatcatgataataccactgttcaacaactctttatttttgaaaaattgcgcaaaaacagttacagcgttaaacggcattttttcaatcttatctgacgtatcgggttcctgttcagcaaaggtcacgcgatagccaaagaatgttgttgttaatgcgataaagataatgacaattgcaaatagtgaaatattatttgcattccaaatacctacggcaactaatggtccgattaagtttggaatcgttgaaaatagcgagtacaatgatacaccttcagaacgatgttcctctggtaatgcatcaataatacctagctgtaaagacatagaaaagaatgccgtacacacaccttgcataacacgtgctacgaaataaccttctaagccagtaaaaccataaataattaaagctatggcattgataatcaaaataattcttaatactttaatgggaccgacacgagcaataatttgtcctgcccatggtcgaaataccattgctgttaacatgtatgcccccataacgataccgataaccgtattcgttgcgcctaaatcatgccctcgtaaaggtataaacacgtttaagattgcattggcactaaagaacatcaatgttaatatatataatctcaaaaagggccaagccattgcacctttcattatctcactccttagaatgatagttgtttttctattaattctcttgtataagcattgtcacttttatgcaatgcgcttgtcggaatttgttcttctatttttccgtttttaaaaataattaattgatcacataaatacgtggcagcttgaatatcatgtgtgataaaaatataactcaactgacgcgtttcacgtaaatgaatcaataaatctaatatttgtgtttgaattgacatgtcgagtgaactaatggcttcatcaaacaaaatatatttagggttaatacatattgcacgcgcaatcgcaacacgttgcgcctctccacctgataacatattaggatatttatccatgtatgccttagatagaccgacttcttccaacaatgtaattgcttggacttccataacttctttaggttgtccatcacattgacacatcacttcaaataagatttctctaacagtctgaaatggatgtaatgatgacgtataatcttgaaatacagcaccaatttgatgacgtctcactttcttcttatgcatcggttgatcatttaaggttacacaacctttatccggtttctcaatacctaatatcatacgactcaacgtcgatttaccgctaccactttctccgataatcgcaatcgtcgcaccgattggacactcaaatgacacacctttcacgataggtgttcgacgacgcttaaaaacatgtgcgctttgatatgacttttcaacatctttaattttaatcatgtacatcacccctcatcacatgtttaaaatgatcattaatcttcttcttcgttgataataaatacttcgtataaacatgttctggatgatgcaagactgattcacgtgtcccttgttcaataagctgaccatttttcatcacaacaacacggtctgcaatcttgttaataaccgttaaatcatgtgaaatgaaaatcatcgcacagtcaaagtgttttttaatatctataaatgcttccagtacatcatattgtgtaattgtatctaaagccgttgtcggctcatcagcaatgattaactttggtttcaaagctaacgctaaagcaatcatcaatcgctgtaacattcctcctgataacatgtaagggtatgattttaatatacgtttaggatctttcaaacttaaataatccatatattcaatcaatgtcttttcaatttcttgtgtagacattgacgtatgtactttcatagtctcaaacatttgtttaccgacagtagttgatgggtcaaaggcacgactaccttgttgcatgaccatcgcaatgtctttaccacggtactttttcaattgcgattcagataatgacaacattgatgtaccatcaaagataatttcacctgtcaccccgagtcgttcgggattcaaaccaataatcgatttacaagtgattgatttaccactaccactttctccaataacgcctaaagtttcacccttagttaatgtaaaattcacatcactcacgagtggttgatctgtccaggtatctgtaatcgtcaaatgtttaactgttaacaatgtcatgattgcaccactccttttttcacagaacgaagtttatctttagaagagatgcggggatcaatagcaatttgtaaagcatcggataagaagttaaatgccatcactataatcactatggcaatacctggcgcaaacatcatttcaggatgtgtaaacatcacttttctagcttcgttaagcatcatgccccactctgcagtaggcgctttgacacctaatcctaaaaatgaaaagccagatatttgcaagatcattgaacacatcgagctactagagatgatagcaatatctgctaatgttaatggcataatatgtttgtgaataattttcatatcattcataccgattgttttagcaaatcttacatggtcagaagcagtgtactgcataacacttgtacgtataacacgacagaaccatgcccaacgcgtcaaaataaatgccatgataatattttcggcacccattccaaacaatgcaattaatgctaacgttacaacataacttgggaatgccaacataacatcacacgcacgcatgattaaggcgtcaacaaacccttggaaatatcctgataagaatcctaaaatagatccaataagtacagaaacaaatagcgcaacaaagacatataacaaacttggtctaatcgcataaattaacctagttaaaatatctctacctaaatggtcagtacctagtagatgttgaaaactcatgccagcaaatttgtttgctgtatcgatatggttaggatcataaaatgtcacaagtggtgctgctaatcctaaaaagacatataatacaataatgcctaaagcaattactgcacctttatcttgtaataatcgttttaaaattatcatcgtgcgccctcccttaatcttggatttaatagcgcattaatgatatctgctaatgtattaaatacaataaataataccgctacaattaatacatatgcttgaatgactggaaaatcgtgttcaagtattgcttttaaacttaattgacctagtccaggccatgcaaagatatactcgataacaactagtccacccattatcattggtatagacatacaaaagattgataccgcaacttgtaaagcattacgcaacacatgcaacattaatgtgatagatttcacaccgcttgctcttaaataaagtacataatcttcatttaattgttccaccatcgagcgtctaacatttctaaagtaaataccagcataggcaatcgtaataacgatcactggcaatatgtaactttctggacctgttaatccagaagtcggcaatatgtttaacttcactgaaacgtaaataataagtattgaagctatccaatatgatggtaatgcagttagaaagaaagccactgaacgtatcgcacgatcagtgaactttcctctttttaatgcactaactacacctaaaataattgatgtaatcatcaccataacacttgaaattattgttaatttcaatgtattcataaatgctggaccaatacgttcagcaactgggtcacctgtaatgtagcttgtaccaaaattaaattgcatcgcttcaagtaaccaatttttatattgaattaataatggatcattgaaaccgtacttctcattcgtttctgcaatcaactctggtgttacatttggcgtcccttgtgcatgtaaaattgtcacagctggattttcatttgtaatatacgtcaatagaaatgtcataaaacttactacaatcatcaatggaaacatgagcgcaatacgttttaagataaatttgaacatctaattgctcctttatttatactgcatttcattgaatggtaattcatactgtgattgtgtgaatgatactttttctaaatcttttggtgcaacaactgtcatactaccgtgtgaaatagggataaagataccttcatcatcaatttgtttcaaaatgtttttataagcgtctgaacgctctttaccgttttggattttaaatgcgtcatcaatgctgttgtatattttatctttgttctcaatgcctgatgttgcactttcataaccatttttctctttaaatgctgcaatagtactttgtggatcgtacaataatccccaagtttggttgaacattaagtcataatcaccagaagtacgacgttcagcaattttatctgatgtttcgccattgatgtttaacttaatacccattttcttaaattctgcttgtaagtattctgcttgttctttttgacttgaagaacctttgtcatagtacattgccatttcaaggtttttaccatctttttgacgaacatcgctgtctttacctttcttccaaccagcttcatctaataatgattctgcttttttaaggtcatacttacgtgttggcatatcgaaattaatgtctgttacatttttcgcaaataattgagttgctggtttttcttgaccatctaaaatttctttggcaattttatctctgtttaccatatgaccaatcgcttgtctgactgttttgtcactcacagcgttatcttttttaccagaattgacaactaacattttcgtattcataggttgactacgcttaacttgatagtcacctgtatctttcaattgttttaaagagtctttgtctaagctatctgtacctctatcatctgtgaaggcaaagttcgtttcaccttttttcattgataggaatgctgtttcaccagcaggcattacttttgcttgtactttgttaagtttagacttttcgccccagtattgatcatttttgttaaagtctgcagactcatcttttttgtgttcacctaatttaaatggaccagtaccatcgaactttttaacgccatcttttgttgtaccgtttttaaagtcttttggagacacaaatacatatggacgaggcatcgctaattcagccaatgcaggttgatatgcttctttcaaattcaattcaaccgtgtacttatctttaactttaacattgtcaattaatgtcgaaatctttaaccaagaatgcaattttttgttttcttgaactgcgtcaatatttttcttaactgcgtcagcatcaaatggcgtaccatcatggaatttaacgtcatctctcaaatggaacgtgtatgtcttcccatcttcagacacatcccactttttagctagtaaaggcttaataccatctttcgtgttacgtacaagcggctcgtatatcatactttcagcagacattgatccaccgtaaacatgcggattcatatcaccgatatctttaaccgtcgtatacgttaattgcttgttttcttttttctcctctaaacctttattaccgccacaaccagttaaaattagccctgatgcaagtaacattgcactcattttagttagttttctcatttgcttttcctctttctaaattgataagttgcattacttaatcaaatcgtaatgattatttttctcaattatttgcttatttttatgtaaatgtcaaacataattcaataatttttttctattataaaacttcaaacccttattatgaaagcgttctattgatttccaaaaattttgtgacgagtgctttatctccttcaaatagatttgtattaaattgagaagataagtgttgatcttgatgcatatccttgtacgcctggcaacttgcttcatagcgagttaggaactgatcaatcattggcgttttgatacctagcattttcccaatatgctgaatcatcgccgttctgtaataatcttcacttggcattcttggaatttgaacaacatcctgttcatttttatagacttgcttaaatggtacagctgaaaaatcaaagtaatgtccgttttcgtctggctgtgaaaatggatcaatgaggattgcggtatatcttacataaagcagatattcttgtaagatatctggcaagatttcgaaatgctcaatatcaccttcatccaaagtttcaggacgtactggataattttccttcaccataaattgaagcaggttgactgacggcactctaaatgcttgtaaaataaccatcatttccttccacattaaacgcatttcacggattagtgtcatcgttatcggtccttcaggaaataacttatacacataaaccggtacatctgttccttcgaaaatggctttcaatgaaaagtcattcataaatagtggtgggtgcacataaagcgaactgtttcgcgtttcagcatgcagtggcgattcaacgacttctaattgaatcttcaattgctcagctaaagcagagattcgttgacacattgttgagtttgaatgtgtcgatcccatgtacaatttcttttttacacctgttgtcaacacatgattaggcgcttctttatcaacaatacgtgtatcgccaagataagttgagaatgaaatcacttcgatatctttattaaatttagacataaattgttcgacaatcatttgcgaaccaaatgtcggtgatattaaaatgacatgtttgacactttgcaaagtttctaacgacaattgctgtagtgtgtcataataagcatctgctgtgcatgccatgacaaccgtttcgtattcacccttaacgtttttaacatctttatacaaacgattaatttcaaacttaccttccagatgttgatgcgcctcgttttgtattttgacttcaaattgtttctcttttttatacgcttgatataagcgttttgatttttctgatgttgaggcacgtccaaccatatcaatctcataatctgattttaaatagcaaatattcgctaattggattgcgaccggaccagtgcctatcattaataatttagacatccgtaatacctacctttatagctgcttttttataaagtgctatatcaaaaatttgctgtggtctcatatgtttattcacacattgccacttatcttccgctgtttcttgtgacggataattaaatattgctttgatgccatcaccaaagcgcattgcaactacgacattttcatttgttaaatcatataattcttctaaaatgctgtactttaaaggaattgtcgagctgaatatgatatgcgtcacatctttgatatctttaagttcagataccttttgatccgtaattgttatatcttcatttggtgctaagacgttaacgattctgcgccctaggtcaacggcttgtggatcaatatcaataccgataactgaagcacctgtttcttttgctacttgaattaacgtcattggatatgcacctgaaccaactaacaataatttgtcattgctagctatactacattgtccaaactcttcatcaatacaatgttctatattgtcaaagtaacctgtggtagacgcctgtccgtctaatagacgtctcgctctaatgacttccacttgtttaacacactgcgctgtaatatattgcagtgattttattaattgtgctttttcttcaacgtcacgccaagcattaaattgttgttcataaataggatttaaaataaattcactatagtcatccatcaatgtttctaatgcttcgatatattgatcgtcttgtaatacacgctcgtaatgcgcttcaaacttttctaaatattgttgtaatatcaatttgatttcattattaaagttattcattgtaggctccttattctatatatgcttttcctgtagctacagttgtaacctgtcctttaattgaagtttgatatcccaattgatgacatcgctttgatgtcactaaaatactgccccctggctgatgtactgtaaaatctttgcatgcgtcattacgttgataattattaaaaaccccaattgatgctgtaccagaaccacagctattttcccaaattaaactttgaatttctggtatatagattaatggctgtaaaaattgacgttgttcatcaaaaagcatcatacctactgttttatatttgtgactccattgttgctcacgcacaaacgcttcaaccaaatgttgaatttctgttgttacttgtttaactggaatcacataatgtacatatgtttcataaataatttctattgctttccatgaatgattacccatattaattgttgttggcacaacacgatgggcttgtggcatttgaacttcatagtattggcaatcatgaattgcgcattgcactaaatccgaacagccagacaccttcaccttaaactgttggtctttaagcaaatgactttcctgcaaatgatgtatatatgacatcgtcgcattaccgcaaaattcattaccgctcataactaagtgaaaatcattaccatcatcattttgtgttgattctataaagcctacctgttcacagcatacatgtgttgcggccatcaactgattggcgatagatgcatattcactagcatcatgttttgaatgaacaagtatcgtcatattccccgaaggattatacttagaaaattctataacctgccgattcatacgacactcctttagatgtatttttagagcctctgtaattttaattactagaggctcttatgcagttgttgcgaagcaaacaactgtattcctctaaacctgtaattttttagaagatgaacctaatagctctatctagtaggtaagtcatgctaattcgcaaaagcgaaaaccatggctcttatgcagttgttgcgaagcaagcaactgtattcctctaaaactgtaattttttagaagctgaacctaatagctctatctattaggtaagtcatgctaacccgcaaagtggaaagcatgacttagtaatcggttgttgtatcaaaatgcaaccgtaaaccttatttaaagttgcttcttgtggctctacaagcgaatgcagttgtccgttaactacattcacttagatgcttttattgttttcacctcaactaaaacttcaaaaaagttgcagaaaacaaatcgtaactattacgatttgattatatactatattagttgagaatcattgtcaataaaggttgtaaatgaatgcacatttatattttgataatccttccataaacttcgtattctcagcacattcaagtctttttgaaaatttttatcaataattgagtagaagttccgttctagtcagttcaaaattttacgtaagttgtctctgcgtattgctttagtgagaataacccacacttgtggaaacgtccttttgttaatctacaatggatacccttgtctttcgctaacatttcctattaccaatcctgtaacggattttcatcgtcaagttgttgcccatacaatacgcaccaaaaaagctttgtacaatttcgtacaaagctttaaaaatttaaataaaaatatcattgttttaatgaactagccatatcagattttatttcgtttgctaatacttgtaattcagggaagtaattattagcaaagccaattattattttattttttacaaacgtgttaatctctcgatcttctggaatcgtattttctattaaattcaaaagctcactatgacttatgttctctatacttactgtatttaaatattttaaaatcacaagatacaattcatcaaatacttcatgttcaaaatcaaagtccaataataataaactaacggaattagtttctaactgattatctccaattttatctgcaatctctcttatagcttgatatagcaatctaaaactttctttttcttttaacataaaattctccttaatttattagaatagacaaaatacagcttattttaaagatactccaaaagtttgaactcgagattctgataaattagatgcacgacctacaatacgttaaaacaagctttaagcaatacacttcaaatgaacaatatgtgattttcaaagattaattaatctccgctttaaatgtctttcattgcgacaatatgcatacattgcctacttcatgccaaattcttttccactggatatcgattttaaataattattccaatgtccgcttccacgaatcatcacttaacatctcgccaggccatgtgtaagccatcacaccaccatcaattcgaatcgtctctccagttatgaatgaactgtcgtcagatgctaagaagactactaatttagcaacttcttctggtttacctaaacgtcccagcggagtcatccatttttgattttctctaaatgttttacctgcatcatcctcactcgtacctgtcagtttatctactaacggggtttcaattgtacctggtgcaatcgcattggctcgaatgctatcacggccatactcaattgcgattgattttgtaaaattaatcactgcacctttcgcagcattatatccagagcgatacaagtctgctgcttgtccggaaaatgaagacgtattaacaatagagccaccttgattcatcattaaaggtaacatcattttcgtcattaaaaatgtcccacgcatatctacattcataatcttgtcatacacatctattggatactcatgaattctatcagccgcattatccacaccggcattattaaacaacacatcgattcttccaaactgttcctttatgtcagacacaaagtctaccacttgttgttcgcttgcattatccacattatacgccttcgcattgtcaccattacttttaattttatcgacagtctccgataccgcttcagctatgtctaccgccaatacatacgcaccttattgagctaaagcgattgcagaagcttgaccgatacctgtacttgctcctgttacgactgctactttattttccaaacgtttcattcagtcactcctatacaacatatcttaaacttacagtccttattttccactgttcgatgcttcataaacctaatagataagtcttcaggcagtcttaactactctgctatacactttctattgaataactcaaaatatttaacaatattagtttttttatttcctgaaaattgttacttttgagagtattttttgttacactttaaatatttaacaaaggggggaataattgatgacatcaaaacatcaacaaaaggggtctatcgtcaatcgtttcttgaatagtgttgaaaaaatcggaaataaattgccagatcctagcgtcttattctttttaatgtgtgtgggcttagccattatgacatgggttatctcattatttaatgtatctgttaagcatccaggtacgcatcaaaccatttatattaaaaatataattagccatgatggatttacgatgataatgaatgatacgattaaaaatttctcagagttcccagcattaggcttagtactagcagtgatgattggtattggtgttgcagagaaaacaggatacttcgataagttaatgatttctgttgtgaatcgcgcaccacgtttcttaattttaccgactattatattaattggtattttaggtagtacagccggcgatgctgcgacaattatcttgccgccgcttgcagcaatgctttttattaaaattggctatcaccctatcgctggactaacgatggcatatgcttccgctgttggaggatttgcagcaaatatagttgttggtatgcaagatgctttggtctattcatttacagaaccggcaacacgtatcgtttcagattctattaaaacaaacgttgctatgaactggtactttatcgcagcgagtgtcgttgtattacttcctacgatattgctagttacaactaagctcattattcctagattaggaaaatatgatgacagtttaatgcatgatgaccatgaagaaacatcttcacatattactgacaaagaagcacatgctttaaaatgggcaaatatcagtttcatagtcacaattattttattaattattacagccattcctgaacatagctttttaagaaatgctaaaacaggcagcttactagacgatgcgccattaattaacggtgtcggattaattattcttgtcgtatttttagtacctggattagtttatgggattttaagcaaagaaattaaaaatacaaaagacttaggtaaaatgttcggcgatgctgtaggatcaatgggaacatttatcgttattgtgttttttgcagcacagctacttgcgtatttaaagtggagtaatttaggaattatcgctgctgttaaaggtgccaaattattagaacatcaaaacggtattgtattgatactaggtattattgtactgagtgcaatggtcaacatgttaatcggaagcgcatcggctaaatggggtattttaggaccgatattcgtaccaatgttaatccttatcggctttcatcccgcattcacacaagtcatttaccgtgtaggcgattcaattaccaatccaattacaccgatgatgccgtacttacctttattattaacttatgcacaaaaatacgataaacgcatgaaactcggagccttactttctagtttaatgccgtattcaatcgcgctaagtattgtatggacagtatttgtcatcatttggttcctattaggtatccctgttggaccaggtggaccgatattcgttaaataacagtattcaaagggataaattaaaatgccactatacaagatttgacctgtatagtggcatgatttgttatgatatagcgttcgagatgaaactctgcatttatatgaacaattatagtctatcactaataatatttaatctgttccaaccgttaatttggtttacaacaaagacaagatcaataatttgttcttcatcataaaatgattttagccggtcaataatttcaaacttcttaaagtctttgattgaatttaacatttctgcaaattcaagcgtcactttttcttgatcagtaaataaatctaaatgtctaaaactcaagacttcatcaattttcatttgtgttacacccaattcctttaattcttttttatggatatcaacacaataatgacaaccgttaattttagaaattaataacttaatcaatgcactaagttcatcattaacgggtgattgatgaataaacttttcaccttggctcattacagacattaactctccattttgtttcttgtaattatacggcatttgcaatctctcctttacattgtttaataccaatccagtgatactacacttcgaacaatattggatagaatttgaaattctgtataacatcttgtcaatctatgctttagttaaaacatttagcacttatatttaaaaaatatataaaatatgaaaacagattgaaaggatattataccttgctctacccttttttataaaaaatcacacacatttgagaaaatttgataatgtcaataaatcacgtcatcgacattgttattcgatatatattgttcttataatggccaaactattattccatttaaattaacgtggttcgtttgtgttaatgtactgtacaaaactggggaagtattggtgatgatgaagtgatttatattaattgcgaaacaccttcgatagcaatgacatagattattggaagattaaatcaaaaataaagaagaccctagtggccttcttttttatctaattcttctttgattttttctggtgattttctttcatgtgctggttttaataatttatctactccttcactttttatcatagcgccaccaaattgataattatgttcaggcgatgcataagcagtaaaatcatcttctttattttcattgatgtatccttcaatcacagcacttcccataggacttgtttccaagtttgtgaaatgtacagatttaatcgtgttcgtttctttagtattatgcttaagatagagtgtaatacgttcttgttgttctttgtagtaaatcgctttttgtttttctttttcatcatatttcattttaaaatgcatgaccgtagaaactgtacatatacacaatatgacaccaataattataaaaacatgttttttggacattaaagtaactcctaactttagtgactcttctttttatttagttctttttttatatcatctggtgattttaactgattggctggctttagtaactcgcttaatttttcactttctatcatagcaccaccaaattgataattatgttctggtgtagcataagcagtaaaattatcttttttgttttcatttatgtaaccttcaatcacagcacttcccataggacttgtttccgagtttgtgaaatgtacagatttgattgtattcggttctttagtgttatgcttgagataaagtgtaatgcgcgcttgttgttctttatagtatattgctttttgtttttctttttcgtcatatttcacttttaaatagatacctgcaacactaattaatatgattaacataatactagttaatattaaaattttctttttcgacatctatcaccagctcctaaaatgtggtggaattttatacagtttacatatttatgatactacaaaacacactcttacaaagaaaatctataattttaatctaggtcaaggaaaagcagccaaaagtgtttatataagatcaacgaaatattgcgggtataaagtggttaacagataaatacagtggaaattgtactaaaaattcaacttttcatttttatatgtaagtatgattaacttgaaaacaaaattaaaacggccgcatagttttagcggtcgttctttttagactctaattccttttttatctcatcaggtgatttggtttgatgtactggttttaataacgtgcttaaatttttacttttgattaaacttccaccaaattgataattatgttctggagacccatatgcaacaaaatcatcttctttattttcatttatgtaaccttcaattactgcatcgcccataggtcctctttttaaacttgtgaaatgtacagttttgatggtattgggttctttagtattatgcttaagatagagtgtaatacgctcctgttgttctttatagtatattgctttttgtttttctttttcgtcatatttcacttttaaataaatgactgatgcaactatacatatacataaaatgacaccaataattataaaaacatgttttttgttcattaaagtaactcctaaaatgtggtggaaaatgaaaaaatttttataatctataattatgaacattacagattataaaccataacactaacatcgtcgccttcattaacttgattgttaaaatcagcaattactgagaattgtacaaggaataattgcctattatgccctcatgtaattattgccttactaacattaacaaaatcgatagctattacattaaatgcctataccccagacctcaaacacctttttatacaggacgcactgtaatttcattcacgttaacgtgctttggttgtgttaatgcatataatactgcttctgcaatatcttgtggttcaagttttttacgatctgttggattgtatgcggcagttatggctgtatctaccattcctggagaaatgcttgttactttaacgcctgtctttgccaactctttttctaatccttgagtaatagtgtgaactgctgctttcgtcgcactataaatcgtactacttttcgttacttcaaagccagaaatagatgcaatgttaataagatggccacttgattgttctaacatagttggtaatgcagcctgtgccgtatataaagtgcctttgatattcacatcaatcatactatcccactcatctacttgataatcagtaatcttagacgacaacatttgccccgcactattgataacaatatccaaaccaccgaatgtttgttgtgcaatttttatcaattcatcgacttcttctttattcgttacatctgttggcactaccttcacactatcttgtgacaattgattcgctacgttttgtaatttttctttatttctacctgctaagacaacttttgccccttcttcatgtagtaatgttgcaattgcttctccaataccactacctgcacctgtaactactgctactttatctgttaatactgtcataatgatcgactcctttgattctttttattttttcagggtaaatcataaatacatattacttttaaaaagcgtatcacaattcatataacggtcataataactcgcttcattttcatagataaattacattacaagccattcgaaacatacaattaatcgttgcttatattttttatttttaaaaatgttgaaaaatcgtcacttctttattgtaaaaacattatattagtaataaagttaatactgtgatttatcattcgattgaatgattagagggaggaataaaacgtgacatatcatgagcgtgttttagcattaagagcagaaagtaaaagaaccgcatttgattttcgattcgaagatttatttagcaaagaagaatggctaagtatgtctcttgcagaaagacaaaaagctgaaaaagcatttcgacacgaagttaaaaatatggacgatgtaagaatgcccttctcaagtgtccatgacgcccaagtaaaattatataatgttgtatattcttataacggcattaaacgtaattttaaacaagttgaaaatgaaggattctaatatcatttcgtttatatatagcagacatgatagaattttatatgtaaatcttgtaggtaatcgttttaaaaataatataagtatgactaaagccacatccaatataggacgtggcttttagtatcgttccagatttgtggggagttagggtttacttaattaaaggggtctgccctcaattgctcaccaacgagggcaagttacatcaatcacacttcaattgccgccgactaggggtagtaatcattggcaataagaactagttagtgactaacgatttacgttccatagcaaagtgatacaaacgctcagcatcaatgtaaggcatagaatcaatagttaggtaaccatctttgatgtcaccaattaatccttgatttacaccagtgttcacgtaaatatcatagctacttacgtctgagaaaataagcgcttcaatctcttttctcataatcatcactccaatgtttatatagtatttatataaactctctcgtctctctctatttattaacttcttacaagtctaatattacatgaatttccaaataaataaagggatttgtgatgtatttcacaaatttatcactattttggaaaattaagaaatatttaattatataaaagtttaataagtcagaaaatatgataaaatgtagatgttctttagacattaaaagcttctaacatgatacggaatatgaggttcctgtatcacattagaagcttttttgttgcggtgcttatattaataatggcatgaatgaacgcatgctgtcttagctccaagaatcatataagctattaaacttccgttctttgaatattttttaatttcttactaatatcatccagttcattcttcgcctttttaacccaatctccttgagctacattatcaaattcacctttaaattttttgaaatggctacctatatttcacagctcactttagatatcgaacttgtttcttcagagttacttgttatattaccaggttttatttgatattcagtttgactcataccttgtatcctcacttggagtatattgtacagaatctgtaaaataaatgttttcttctttattttcgacaaaggtaaattcaagacttctagaacctacggatgaaccttttaaatctccatcgcctttcaataatagtttcggcgcttgtttggttggaatatcatatctttttcttaactgttggacattataatcatcattattcaattgatattttgccgaataacttggtacattaggattatatgaaatatcaccatctttataatcattaatatctttaaagttgccatattgtacaaagaacttaaagttttcaatctctttttttaacttgtcattcggtagtggcttcgttggtatgattttattatgttccatttttaccggataccttttttcatcatcctttggtctgccgttactgtcatctgtcatttcacttataaaataatacccttttgtggttctagtattgcgattgatatagagcaccattcctctcgtttccatatccttaccttttggctcgattaccatttcagaattaactatccaagtacctttatcaccctttttaaattcttgatctcgaaagccttctttatcgtaaaaatcatcgagatttttggttggatataattttaatgtttgattaaatgtgtctttaatttgggcgtttcgaccatttgtttttgtcataatgacataacctacaatcaatataatgagtaataccaagcatataccgagcgttaatttctttgaatgaatcatcatttctccaccttatatttttaatattgactcagtttttaatatttacaactaaagcgaaaaattattttgaacactttatgaaatttttatttcaaacttctattaaccctattcagtaggtttgaaattaatactatcagaaaaatacacattttcttctttatttcttataaagttaaattctagttctttagaacctacggatgagccttttaatcgccatcaccttcatacagtttgaagtcatatttaccaattgtaaatgacgactagatgatatatagttcaagaaacatcaaaattcgttaaaacataatcaaattttattatgttcaaaactttattttccaaaaaataaaaaagaagttaaacaaagattggttgcttaacttccattattgaattcattagtccgatttgacatagatcccgaaaaataatggctaatagccacttatagtcgaaattatgaactatataattcatttattattaaatggattatatacttattgtgtttcttaatacctttttatactttaatatcttgaattttttctaaatcattactaatatcttttaattcgtctgtggcatttttcacccaagccccttgtgccgcatttttaaaatcatcttcaaattttttgaaatgacttaccatttggtcaagtaatattttctcatcacttttcagcttattttgatgatcatgatgcatacgaacatgttcaggcgcaataacctcactaatctgttctttttccttcatttgttccaatactgctaaatctggtaaaccactaaaatcaagtcccacgcttattcatctccttcaattctgtcagattgttttagatattctcttcttaactcatctttataatcttctaatttcatttcgtgatgtcggatacgttgattcgtttctctatcgaaagattctataatacgtgtcatcctgatcatagcgtcttcactataattcattttatgtttgagatataagaaatgatcatacatttgttcacatttcttgcgtgtttgatgtcttaattcatcaatttgattgaatgcatcattcaattgttttctttcttcatcataggcattttcaagttcattaatatttttatacgtagtaaacattacatcatcccatcaatctggctcgctaacatttggtcattagaaacaattgcttcgatactctgtttaatttttgcgatatagccattacaatttttataaacatcatttaatttctttatcttatcatcaatttttcttttgggatctgtttcaagtttactttcatacgcgccaccttttcttaattcatctataacctcttcagaggttaatttttcaccaatttcatttccaacttcttgcgcttttttccagttgtctccaaatttatgtgccatcgcgtgatacattttttcaaatgttggctttcttcattcactaattgatttaagccttcggcaatggttagtgctgttaaagcttctaataattgttgttgggaggaagagagtgatccacccgttgtttgaatccaattcgctcttaacgtctctactttatgtaatctatgcctcgtttgtttacgaacggattttaatgctttattattttcgtcttggtagcctttaactttgtttaattcagctaagattatagcctgtgttctgctcattaaaataccactcattgcatggccttctccatttttaagtactattttttctccagcagtttcatataaatgattgcggacacctgcatctaattcgtcttcatcagacacaaatcttacaatgtgaccatcgtacttttcaatcaattttttaagttcttcttgatcggcataaaggccgctcacatctttgatcgctaatggagctggattatacacaacgatatgtttaatatcattactcatacctaaaatcatcgcatctctaccgcccagcgaatgtccggtaataatatcaatatcatagtcttttttgatatttttgataaagtcttgggtatttttataatgtggatctttatctgtgacggaatgaaggccaatattgacatcggccccaatatcttttagcgtttcactcacgtctatatatccttgataagaaggaacaccaaatgtttgttttaatattgcgtctttgtgtacattagtacctgtcatacctaaagtaactttgccagtgtctttatttaaaaaggcgcttgtagtcgtgcctgttttggggtccgtataacttttaagatatgaaagatttttagggaatttatttttttcttgtaactttttaatttgtttatcaattttattttgttttaaaccactgttatttgcgttttctatttcataacttatattagatactgtacttgtttcttcagagttaccttttatattgccagattttatttgatattccgtttgactcatgatttatcatcctcgctaggtgtaaattcgaccgaatctgaaaaatagatattctcttcttgattttctacaaacgtaaattctagatccttagatcctacggatgagccttttaaattgccggatcctttcaattttaattcgggcgcttgtttggttggaatatgatatcgttttcttaactgttgaacattatagtcatcattattcaattgatactttgcagaataacttggcacattaggattatatgaaatatcaccatttttataatctttaaaatctttaaaatttccatattgtacaaagaacttaaagttttcaatctctttttttaacttgtcatccggtataggctttgttggaataattcgattattttccatcttgacaggatattttttttctttactacgtgaatatcctttactatcttcagttatttcggtgacaataaaattacccttcgttgttctagtattgcgattgatatagagcaccattcctctcgattccatatttttcccttttggttcgataaccatttcagaataaataatccaagtccctttatctcttttatcaaattcttgatctcgaaaaccttccttatcgtaaaaatcatcgagattcttggttagatatacacttaatgttttgttgaaattttctttaatttgagcgtttcgaccatttgtttttgtcataatgacacaacctccaatcaatataatgagtaataccaaacatataccgagcgttaatttctttgaatgaatcatcatttctccaccttatatttttaatactgactcaatctttaatttacacaactaaagcgaaaaattattttgaacactttatgaaattttcatttcaaacttctattaaccctattcagtaggtttgaaattaatactatccgtaaaatagatgttttcttctttattttctataaatgtaaactctaaatttttgtgtcctatagatgatccttttaaatcaccatcgccttttattaataatttaggtgctttcttagttggtatatcatacctctttctaagttgcttcacattgtagtcatcattacttaattgatactttgctgaataacttggcacattcggattatatgaaatgtcaccatctttataatcattaatatctttaaagtcaccgtattgtacaaagaatttaaagttttcgatttcttttcttaatttatcatcagctatcggtttggttgggataattttattatgttccatttttactggatattctttttctttactacgtgagtatccttttttatcttcccataattccctcacaataaattcaccttttgtcgttctggtattgcggtctacatacaggaccaatcctctggattccatattctttccatttgtttctattgtcattttagagtgaattatccaagtgcctttgtcgcccttttcaaactcttgatctcgaaagccttccttatcataaaagtcttcaagatttttagttggatacaggctcaacgttttgttgaagttttctttaatttgtttatctttactgctttcttcctttttcattccgcaagcccctataaaaacagctaataatactaaatacagccagagcctcaacctttttgagtgaatcatcatttcacatccccatttttatttttgatgcaaagttaagttcaaattccaatattaataatattagaggaaattttatgattaaatcctcgtggattttaattgttagttgtatttttcacatatcaacatcacaaattatttaaaaagcgcaaatatctttataatttttattggcctaaccaactaattaattaagataaattgcgcttatatttaaaataataacactgaaactcaatgtatttacttattaaaattgatgtttaaatacaactttactaacattcatttttcggtttacattaatttgttagataacgatatatatcatctcttacagctttatccagtgctaaatccatcgttactacgtttgaaccattcggcattttatcttgcttttctgaaccttctatatatccagcagttcctaaataataaaaatatataccatcatcatcttttttctgtacaaaaatatacattttaattccttttgctctatgggacaaaattttctgaacttcttttgattctagcgttctattagatttagtaaaccattttaattcatcttgacttaaaaattcatcttcatattttgtgctatcacttatatcctcatgcttatcataagtgataaatattggcatttcttggctttttatcatgtatcccatgattacagacgaaccatttttattccaattaaatattttactaaaatcttctcttgaatatttattatataaaatcagtccatttttacctttttggtatttttcattgttatactttgataattcaataagatcttctaaaaacatattaaatgtttgattacttagagcattagtaaatgcatcgcttagtcttatcattctttcattacgttctataatgggacttccatagattttttcaattcctgcgttgtaaaatgaaaaatctaaaattcttaatgaagtatctatatcatcttctgttatatccttaacttcgttcaacattttattttttaattcatcatatgttaattcattttttaaaagttcttctaaaactaaactatcgattcttttcaatccaggtgctatttgccttgaaaagaaaaccagatttttagattcattttccgtcaataatgtatctatttttttatatctcactaagaactcgtaataattactaaatttagaaaatataacgcttggatctatagaatgttgttgtatgaaatccattagtaacggcatgtgtcccaatctattttcaacttcttcataagcttttaatattaatttattttgatttaatgatactgcatccaatgaattgtaaatctgttttttagcaacttcttcaaaattaattgtagatactccattaatcgaatcgttattcgttaaaaacttcttataattatctttattttgcgattgatccccagaaagcgcaatcggaattaaataatttgtcttataattaccaataaaatcaattactgtaacatactctttatttgaactttttcttaatcctctaccaagttgctgaatgaatataatactagactctgttggtctcaacattacaacttgattgacttctggaatatcaataccttcgttaaaaagatctacagttataatatagttaatcttaccttcttttaatttttctattacaatttggcgataattaacactatcatctcctgttaaagcaacacttttaatcccttttgaacttagtttatccgctaaatcataagcttcttttttgctacttacaaaaatcaatccttgtaaaatttcacctgaatatccatagtaatctgtcttttgaataatataattaactctttcatcagaagttaaatatctcagtttagttacatcatcttctttaataccttgatgtacataatcagtcacaccaaaataatgaaatggacataaaatatcactttctaatgctgcttgtaaccttatttcatatgcaatattataatcaaacagttcaaatatacttaattcatctgatctttctggtgtagcagtcattcccagcatgaacttaggtttgaagtagttaaatactcgttgataagtagatgcagcagaacgatgtgcttcatcaaaaacaatataatcaaattcattttcatcaaattgcttaaaattatcatctctagataatgtttgaatggttgcaaataaatatttggcatcgacatctctatgttttcctgtcaacaatccaaaatcactatcattttttataggtaatacttttttaaattcttccttagctctatttaaaatcccctcattatgaacaataaataaaaatttattagggtttacttctctaacatctaatgcacataaaatcgttttacctgtaccagttgcagatattattaacgccttatctttggctttatccctaatagcttttaatgaccttaatgcttctgcttgcattaaattgggtacaatttccactgattttttcaccttatcagctagcagcatttgagtttgttcaacctccgctaatttttctaaggaacggtactcaaatgattctttatatgaattaatccattgctcagtcagtggggtactcttttgccataacaagtcaaattcactttttacactatcaactaaatcgccatttttcatagtagacagtaaaacattatgctcataattaacctttaacgcattagatgttaaattagagcttcctattaccatagaactataatccttatgctcaaaaatatatcctttggcatggaatccagcaatatcagttaatcttacctctacattttttaatttaagtaattctccatacattttaggactattaaaccctaagtaattagatgttaatattttccctttaacacccttattgcttaaatctaatagttgagcctttaagctggctaaaccgctttctgttataaaagccacagaaaaataaaacgtttcacatttttgaagttcatctataattgttgaaagaactttttcatttttattatttactaaaagcttcggtgtataattccctttatgagaaatatgtttgtctataaaccctttatgtaaagattgattgaaatcatttagtaatctactcatattatccctcagtcataattttattaacggctggtatatccgctggggcccaatttaatttatcaagttcgtttattgacaaccattcaatactcttatgttcagttagagttggtaactctttgtttaaagtacatttgtatgttgttaacctaacaattccaaaatcatattcatgttctgtagttataactttgtctccaacaattaaatcacatttcatttcttctctaatttctctaatcaaagcgtctttttcagtttcattcttttcaaccttaccgccaggaaattcccacattaaaggcagactcattttttcacttctctgtgcacaaagaattttgttatcagaaaaaataatagctcctactacattgattacttttttcataagactcacccttcaatttaaaatcatcttaattgttattctatcaaaaattacaaaactatatataaatcaatattaaaaattaatattttacattcacatgaacgctctactccatgcattttcatacacatctattatataatacttgtgaaaagtattgtcttggggctgtgtttttttacttttggggcgtatttctttataattcattacataaatgtaagggctttagttttcatgttttattaagtctaactgagattttgaaaggatgtttagcaacaatggataaagaattatggatagaacgagctaatgatagtttagttaaacatttttatgagcagcaatctgacattgaacagcgagaaggttttgaaagtaaattaacatttggtactgcgggtatacgcggaaaattcggtcttggtgaaggtcgacttaataagtttactattgaaaaattggcattaggtttagcgcgttatttaaatgcccaaacaaacagtccaacaatagtcattcattatgatattagacatctttcaactgaattcgcccaaataattgctaatgtattagcaaaccatcaaataacagtttatttacctgatacatataaaacgacaccggaattatcgttcgcggtgcgcaatcttaatactactgctggcattatgattacagcaagtcataatccgaaagactataacggcatcaaagtatatggttctgatggtgcgcaattatcgactgatgcatctgagcttgcaagtcgttatatcgaagaagttggcgatccattacagattgatatacctatttctaaacaaaatacatcttatatcaagccttttccgaaatctgtaactgatgactatatgaaacacattcaaaatatgattggctatattcctaaatctgatttacaagttgtgttcactagtttgcatggtacaagtgttccgattgtacctgagttattacaatctttgaatttcaatcaatttaatcttgtagaagcacaatgtaaacctgatccgaatttcagctcagttcaaagtgctaatcctgaagatcatcgcgcttttgatcaagcagtcgaacttgcaaataaaagtcatgcagacttattaatatcaactgaccctgatgcagatcgacttggtattgctgaacgtgatgcacacggtcatatcacatattttaatggcaaccaaattggtgcgctgttacttaattatcgtattcaacaaacgtctcaattacgtcaccgcttaatgattcaatctattgtaagtagtgagttaacaaagtcattagcacgctataataatgttgaatacaaagaggtgctgacgggctttaaatttattgctcaggaaataagacaactggatgatcatcaaaatatgattttcgcatttgaagagagttacggttttctatcagagccttttgtacgtgataaagatgccgtacaaattgtgccactcattataaaatacgcttctgagttaaaattatatggcaaaacattgaaagatgaattagaacagatttatcaaactgttggtagacatgaggatacattattctcgcatacgctagaaggatttgaagggaaaaagaaaattaatgcaataatgaccaaattccgttcaaatccaccgcaagagattcaaggactcaaagtgaaagcaattgaagattatttaactagcgaggtttatcatttggataaagatacaacgtcgcagattaattctcctaaatcaaatgttattcgtgtcttatttgacgaaggatttatcgctttacgtccttctggtactgaacctaaaattaaattatatgtgtcgttaaaatgtccgaattttgatgatgtagctcaaaaaattaatgcgatgatttttagctaattaaaaattttatacatcgaaatattacatttcattttatgcttatcagcccttttgaaactagaatccttatgttttcgcgttttgaaggggctaatttgtaataatttttcaaaagtatattagaaaattaattttcatgtatttttcatattaagcggtaataatataataattaataccgcgacctatttaattgttttcgcgatgaaaaaggtttagaattacaaaaataactattttaaatttagttacaaatatattttagaaaggatgtgaaataatgaaaggctctaaacaaatacttttgattatgggcattatatctcttattgttttatttatttttacactattcatcatggcgcaatatgcaaaacattatgaacaaaaatccgacagttccaacgcacatactttaaattcatcatcagccataattgagcaacatactatgtcgaatttagcgtctctagatttatacgctcctgttcgtaacattacttctagtcgtgatattcatcccatttatttcatgacaaaagattaaaacttcctttttcataaccccattcattcaactaataaattaaaaaatgataaaaacgtactgttttttagaaacatacatatataagaaacgcatccattactaaaagacagtacattatattctatcaggaaggtgcaacaatgaccgtcaacatcgtatttagtatcgtattctgcataagtatggttatattaggcatttatgtcgcaataactaaagatttcacactaatctcttttataaatcaaacggccattgcagataaacacaagaaccaaattgcatatatatttacgctatgtataagtttgagtgcagtatttttaatgtcttcaattctaagctttgaatatgattttattgcattagcattcttatttttaacgatagcattattacttatcgcattattctacgtttgcttttataaaattacaaaatacccataaatgtttgtgatagtgtgttggttagatttattgatgcgctgtcagtaagtaattgtttgcgaaaaaaatacaaccttgtacgaatacaaagttgcattaatatagaatcatttatgctttttaatatcacaaaacaaattgattaaactagctaaaatagtcaaaattggaatcaagattacataaatatcataacctctagatattagtatacataatataattagcgaccctattataattgctaaattataagccaaactaattttatatttcatttcaattcccaccttaatagcatttattaaaattctataatgtttacatagacttcttaacaaactttaacccagctaagctaagtattgaaataattacacctcctaatataaatatattacttaagcttagtaaaggtataattatacttatcagtcctaaagacaatgtatccgctgcataattcgatgtagatgagatactaaatactttccccatcaaatgatttggcgtttttatttgaatggcaactgatcttgttagtccctctatagattgtccaagtcccaataatgttgcacctatatataatatcgccacacttggaaacacattaataatcgataagccaattccccaaactaaaacaccaatactaaatttaaagattaatcgcttttctgacagcaaacccataatcaatgacattaataaagatgctatacctaaacatgatgtagctagtccatatacaccaacgccctcttttaatatattggaaataaacaatggtaatacaacacgccaaaggccagtattaatcaatatgcaggcaaattggatgattataataaatggaatttctttagattgtttcaagaattcccaagtttcagaaaaatcttcttttgagtgtctatcaatcatgttgttatttgtatattttaaaagtgcattaaaaataaatcctaaaaatagcaatatactacaaataaaaaagacgccaacattaccaactagtattacaatgacaccaattaaagcaggtaaaataatatttgagcctctttgcaaactatcgattaacgcattacttgttgctaaatgctcctcatcaataatttcaggaagaattgccctaaacgcaggatccgtatagcagttaataatggtgatagctgtagatatggttagaagcgtcagataatttaaatttgatgttattgcaagtaaaggaataattattataatcaaacttagtataagatcagatagataaagtattttctttttattatgtttatcagaatatgcgccaccgaaaataccaaatataataaatggaagtgtttgactcataaccatcattgataattttaaagatgattggtttgtcaattcaacagtaaaccaaattatttgtaacgaaaacagcacaaaacaactccgacgtaagaaattaccaatcaataaatatgtaaagtttctatttttcaaaacttctaaatacaacatatttatcacctctcataaaaataattgaatgcatccaccagcttttttagaccttcttctaaactctctttatccaaagcgcaattaattctaatataatttagtcagttaaatatcaattatttcgaaatatacatactacttgaaacaccatacataacccccaaaatgactactcagaggttatattctactaattatgattatattaaatatgaaaatattatcaaaaaaatcaaatttataacaaaaatacaccccttaaagttaggtctttcaatccaacttttggggtgtatatcattctcatcatattctaggttgtttttaacaaactaaatatagtgaatgcaaatcaactattatttaaattatgaattattttaattctttcttctacgagccaataacattaatccagcaattccaattatactactaaagatcaaacctttttgcgtgctttctaaacctgtttttggtaattctgctcgttttttctcttgattagctactgattctttagcaattttagattttttaactttatcatttttatccattgaatgaactgggccatttggttttgctctgtctttcgataatcctggattgttaggatttactgggccacttggatgagttggtctgctcggcttctctgggttttcaggtccttttggatcttttggtttctctccaccgaactctacaatcttatctactggttgttttgtgatctcttctgttggttgaccctcgccaactttttcacctgttaatgggttcactgtgattggtgttgtgattgtcttacttcctggttgtccttcttgtttcactcgctcttcaccaggttgtaattttggattaaactcacgttttgtttcaaacggtatctctactgtttttgtttctggtgtacccgtttttggtccgtgtttaatcacatcatccactggctcttcgatcacttttcctgtgtctggattcttgattcctggtttacctggtactttttccgtttgatctgttggtaagtttggatcaaagatatctttatgaccttgcggtattttctcgccaccgaattctgttaattcattaactggatcttttgtgatttcttctttcgattcacctttactaataatttctccagttaatggattttttagtgttggcgtcgttattgtcttctcacctttttgtccttctcttgttactttttctgtccctggtgctaaatcaggattaaatttacgttctttctcgaatggaatttcttctttttctacaatcgagtctccttttacaggtccatattttgttacgctatcgaccggtggtctaactacatctcctgtttctggattcttaattcctggtttacctggaacttcctctttctctcctgttggtaacttcggatcaaattcgtctcgatgacctggtgttatcgtttctggtccgtattctgttaattcattaatcggatcttttgtgatttcttctttcgattcacctttactaataatttctccagttaatggattttttagtgttggcgtcgttattgtcttctcacctttttgtccttctcttgttactttttctgtccctggtgctaaatcaggattaaatttacgttctttctcgaatggaatttcttctttttctacaatcgagtctccttttacaggtccatattttgttacgctatcgaccggtggtctaactacatctcctgtttctggattcttaattcctggtttacctggaacttcctctttctctcctgttggtaacttcggatcaaattcgtctcgatgacctggtgttatcgtttctggtccgtattctgttaattcattaatcggatcttttgtgatttcttctttcgattcacctttactaataatttctccagttaatggattttttagtgttggcgtcgttattgtcttctcacctttttgtccttctcttgttactttttctgtccctggtgctaaatcaggattaaatttacgttctttcttgaatggaatttcttctttttctacaatcgagtctccttttacaggtccatattttgttacgctatcgaccggtggtctaactacgtctcctgtttctggattcttaattcctggtttacctggaacttcctctttctctcctgttggtaacttcggatcaaattcgtctcgatgacctggtgttatcgtttctggtccgtattctgttaattcattaatcggatcttttgtgatttcttctttcgattcacctttactaataatttctccagttaatggattttttagtgttggcgtcgttattgtcttctcacctttttgtccttctcttgttactttttctgtccctggtgctaaatcaggattaaatttacgttctttctcgaatggaatctcttctttttctacaatcgagtctccttttacaggtccatattttgttacgctatcgaccggtggtctaactacatctcctgtttctggattcttaattcctggtttacctggaacttcctctttctctcctgttggtaacttcggatcaaattcgtctcgatgacctggtgttatcgtttctggtccgtattctgttaattcattaatcggatcttttgtgatttcttctttcgattcacctttactaataatttctccagttaatggattttttagtgttggcgtcgttattgtcttctcacctttttgtccttctcttgttactttttctgtccctggtgctaaatccggattaaatttacgttctttcttgaatggaatctcttctttttctacaatcgagtctccttttacaggtccatattttgttacgctatcgaccggtggtctaactacgtctcctgtttctggattcttaattcctggtttacctggaacttcttctttctctcctgttggtaacttcggatcaaattcgtctcgatgacctggtgttatcgtttctggtccgtattctgttaattcattaatcggatcttttgtgatttcttcttttggttcacctttactaataattactccagttaatggattttttagtgttggtgtcgttattgtcttctcacctttttgtccttctcttgttactttttctgtccctggtgctaaatcaggattaaatttacgttctttctcgaatggaatctcttctttttctacaatcgagtctccttttacaggtccatattttgttacgctatcgaccggtggtctaactacatctcctgtttctggattcttaattcctggtttacctggaacttcctctttctctcctgttggtaacttcggatcaaattcgtctcgatgacctggtgttatcgtttctggtccgtattctgttaattcattaatcggatcttttgtgatttcttctttcgattcacctttactaataatttctccagttaatggattttttagtgttggcgtcgttattgtcttctcacctttttgtccttctcttgttactttttctgtccctggtgctaaatcaggattaaatttacgttctttctcgaatggaatctcttctttttctacaatcgagtctccttttacaggtccatattttgttacgctatcgaccggcggtctaactacgtctcctgtttctggattcttaattcctggtttacctggaacttcctctttctctcctgttggtaacttcggatcaaattcgtctcgatgacctggcgctattgtttcaggtccgtattctgttaattcattaatcggatcttttgtaatctcttcttttggttcacctttactaataattactccagttaatggattttttagtgttggtgtcgttattgtcttctcacctttttgtccttctcttgttactttttctgtccctggtgctaaatccggattaaatttacgttctttcttgaatggaatctcttcaacttttttttctaattctgttattgtttttggcgcttctggtgtaaaagtaaactctgaacctttcaagtcagttctcatccagccatttgcatttatcccttgattaaggccccatctttgactagatgtaattaagaaattatatgcctgatttttagataaacctaaatctgttattgaagtctcccaagttttaccagcatattctgctctcattttaccagttgaagcaacataagttaagatgacatcatttaaacgttgcccatgaaactttccatctgatgtattagttgaattgtccgcatagtttaaaaaattagtttttgatttatcaatattttctccaaccatttgtgaattaccagaactgtcatttttcacaaaagctccgtatcctctataaccttgtccagcttgcttttcagttttgtccatggaacttgtataaatgtatccagtatcaattttaaatccgcctgaatttaccagacctttatccccaaggattccaccattagttaaatattcttctgcatttcctttactaaataagaacccccaaccatcagcacctgtggtatttgattgatggttatttgccactctaactttaaaattgaaatccttactaaaatctattttattttttaattgtaaagctcctatcaaaccattactttcattaccaacattaaacctggttacctctgatacccctaaatctgttggttttttttgtatatcaacacttccgtaaccttcaaaatgttctttaccttgaattgtaattggggtagattcaactacatttttagaatctcttgtaatatcaaaagagccttcatcaacagaacgagcttttctaaccttaggtgtctctgcgttatgagtgactgacgatttcggctgaacttcagcaacatcagctacttcttttggtgtatcctccttttttgatatatcttcagcttttactgatggttcatgttcgattgtgtctttgtttgaagttacttcagatttagcttctacaccctgtggtgcagtgtctttgtttgttacttcttcaatcttcacttcttttgattggacattatcttttaatgtagttggattctcaatattgttttcagctgcttctgcctcttgttgagttcccaaatacattagtgagccaattaaaatagatgctgttccaactgtaaattttcttattgaatatttattcaatttatttgatagaaaatctactcttttatttaccggtcctttcttatctctcatttgcatactcctttttccatattttccactttacttacagtgaatttacatgtaattttacaaatacaataggagttgcacaatggaatataacacttatctttataaaattattttatatattgacgcacttaaaacaatctacaaataaaattattatttttagttttcaatgaataattcattcttatctgttggaaaaacccatcaactcaatagcattgaatttctaaaataaaaaataccttaacgcatttaaaaatacatttaactgcaccaagatattaaaatctcgaaacatactttatgtttcattaatatttatttcactcaaaagatttttaatataattgtgttgttttacagaaacaacaatgattacatttctactatcatgtgggtctctacatttattcaagtaacccttttttgataaatcttttacgcttttaacaattctagattggtctataccgatataacttataatgtctctcataaaatatttaccttcatcatttttaaatacatctaaatatgctaatactaaataattatctaatgtaagacaaaaatatttttttaaatatttacgcagctcatatgtagttaatactcttttcattaatttaatattgctcttgcttttcaaatcattcatcaagtcttcatcccttacttttaattgtcacgtcaaataatatttgtctttaactagtaataactccaaatatatttagtttgtggtgctagctataaacacaaatgaatcataacactatattttgattttgttcaattgtttttatttttggataataaatgaatttgtcatttgttattctgtgatttttaattatttatattttatatatatattatatataaaaatatttaggttaacatgtcttcaaaagagattgcttttatattactttaaataatataaagtattgggacatcagaaaatagtaggagaatgtaaggtggactatcaaactttcgaaaaggtcaataaattcataaatgtagaagcgtacatattttttctcactcaagagttaaagcaacaatataaattatcattaaaagaattgttgatattagcatatttttattacaaaaatgaacacagtatttcactaaaagaaatcattggtgacatactttacaaacaatctgatgttgtaaagaacattaagtcactatctaaaaaaggatttataaataagtctagaaacgaagcagatgaacgccgtatttttgtttcagttactccaatacaacgtaaaaagattgcttgtgttattaatgagttagataaaataattaaaggatttaataaggaaagagactacataaaatatcaatgggctccaaaatatagcaaagaattttttatactttttatgaacattatgtactcaaaagattttttaaaatatcgatttaatttaacatttcttgatttatctatcttatatgtaatatcatctcgaaaaaatgagatactaaatttaaaagatttgtttgaaagtattagatttatgtatcctcaaattgttaggtcagttaatagattaaataataaaggtatgctaatcaaagaacgatcccttgcagatgaaaggattgtgttaatcaaaataaataaaatacaatataacactattaaaagcatattcacagatacttccaagattctcaaaccaagaaaatttttcttttaaatttaaacagatttacctcttgataaaataaataagcaatcatactacttctcaatttagtataaataaaaatacataattaactttcttttgtttttatattatttcaataccctactatatatcacaacacataaattaagcatgacactcattcaatttagttcaccatttcgtgttccaattttactgagtatcatgcttttaatgttataaacctaatgctttaataaatcgtgttaattcttctcgcatactgtcatctttcaatgcatattctatggtagttttaacgaagcctaatttttctccaacgtcataacgttcgccttcgaagtcatatgcatacacttggttatcattattcatacgttcaatcgcatctgttaactgaatttcgttacctgcgccttctttttgcgtttttaaataatcgaaaatttcaggcgttaatacataacgtcccataatagctaggtttgatggtgccgtaccttgtgctggcttttcaacaaactttttcacttcatactgacgtccgtttttagttaatgggtcaataattccataacgatgagtatctgcttccggaacttcttggacacctataactgagtgccctgtttcttcataaacgtcaatcaactgtttcactgctggcacttcagattcaacaatatcgtcacctaataataccgcaaatggttcattgccgataaattgacgcgcagaactaatcgcatgccctaaacctttttgttctttctgccttacataaaaaatattcgcaagttccgttgaatactgaactttctctagtaattcagatttacctttttcttttaacaccatttctaattctttttgactatcaaaatgatcttcaatcgcgcgtttgtggcgacctgtcactataataatatcttcaattccagctcttgcagcttcttcaacgatatattgtattgtgggtttatctaagataggaagcatttcctttggcatcgctttagttgctggtaaaaatctagtccctaaaccagcagcgggaatgattgccttttttatttttttcaaagttaatgtgctccttttcctaagtattaaatctatgtatcaacgtcattttaacactaattagaacgccttcatagtgtcattgagtatgtaattatttcttgggaaatttgttttaattttaaaaaacaggcttacttcatataatttatgaaataaacctgtcaattttggattgattatgctttgtgattctttttatttctgcgtaataacgctaaacctaaaatgctaaataatccgccgaacaacatgccgttgtttgttgattcttctccacctgtttcaggtagttcagatttcttagattgtgcttttttagttggtaccactgctttaaccttttcattgatttcaataacaggtgttactactttaccttgttccactggtttagaaggttttttaggttcttctttagcaggtggtattggtttaccaggttcagttggtacctctggcgttggcggtgttggtgtttccggctcgcttggtacttctggtgtcggtggtgttggtgtttccggctcgcttggtacttctggtgtcggtggcgttggtggcacgattggaggtgttgtatcttcttcaatcgtttgttgaccttcattatgaccacttacttgtggaagtgtatcttcttcaaagtcaacactattgtgtccaccgaattgataatttggtttatctttatttgtatcttcttcaataatttcagtgtgcttattgaatccgtgaatatgtggcacactgtcgaagtcgatatcaatgatattaccaccttgttcatacttaggtttgtctttctctgtatcttcttcgaatgattggttaccattattttgaccatgaatttgaggtacactatcgaaatcgatatctacgatattgccaccttgttcatatttcggtttatcttcttctgtgtcttcctcaaatgactgattaccgctattttggccaccttcgtaacctaattcactcttaatatccacgtggctattttcttcgatttcttcaatcacgccataattaccgtgaccattttcagttcctaaaccagaatgagaaatatgatgattgttttcagtaatttcctcgattggtccttgcgcttgaccatgttcttcaggtagttcatctactagttcaatcagattactttcagtcgtatattctttcgtatcttcaattgttgtatgatcgctaacagcaccagttacaataccttttgtagaatcttcgtcaaattcaactaggttagactcagtagtaacctgaccaccacctgggtttgtatcttcttcatattcaacaacatcagcatgatgttttgaattttcatgtgtcgattcttcaaagtctacatgaatagaatcttcttcagtttcaatggtaccttctgcatgaccttctgcaccttcaacagctgtatgatattcaaaatcaattggcttagaatcattactttcttcgattgtaccagtcaattcatgcttctccactggcggctctgatttaaattcaagttcgataggagtactatgttctataataggttcctttagtttatctttgccgtcgccttgagcgttattagagtaaaatgcaacgccatttttccaagttaaattacttgtataataatagttataatatccaaaaaggtgtgtttgaaattctaagttgctagcatttgaatcataatacccttcatattttattacataatttttactttggtctaaattattaaagtttaaagaataaccaccattagtatcaaaatctaaactcatattatcagtcacatcttcaaatttgctgacatcatcaagctttgcatatacgctttcagctaaatcgtctgaaccaatgtgtttatataccttaactgttggattattaacccctggtttatttcctttagttacttgaccagttactgtcacagagcttaacgactggttgttaggtttcatgtacgcaaaatgactaaatttcccatctactttatttaaagtatcaattcgaccattagctgttactccccaattatctctaactccacctaaatattgaatattaaatattttgctaaccgtagtctcacccaatttaacttcaacattttggttacctttttgcgtcactgttgtaggatcaataaatagatttaaagataattcagcagttaaatctttcttttcttgtacatattctttaaacgtatatctaacttttctttctccaattatttctcctgtcgccataacttgaccatctgtactttttatctccggaactttacgcagtgttgagataccatgagtttcaacattatcgcttaatgtgaaatcaaaataatctcccgccttaattccttctccaaatttccatttatatttcaaggttactctttctgcgttatgaggatttacaacattcgtatcttgtttatgtcctacaatttcactaccttcttctacttccactttatttgttacatctgtacctgtcgctttagtttcttccactacttctttctctgcaactgctgtaacgtcagttgatcttttcattcttggtttaatttctgagacgttacttggttgagctatgtcaacttgagttcctgtagtttccttatcagcaactttttccgatggcaaatcaactcgcgaagtttctacttttggtgcttgcacagttttcggtgcttcttctgttgttacttgtgttgattgtgatggttgctcagttgatgtcgcgctgtatgattgtgtttcatctattgtattaacgttatttgtagttgtttgtgtttcgcttgctttactttcagtagctgaactcccactttcctctactgtagtattgttttgttccgatgctgcagcttctttttcttgtcccattccaacaacgatcattgttcctaagaatactgaggccgctcccaatttgtgttttcttatgccgtatctaagattgcttttcactataatattctcccttaaatgcaaaattcatttatttttaaaactcaataaatgcaattctatattgttcggtttttaaaagcaatgaaaaaaagcgagttaataaaaagttaagattgttgttaactttatgtataatgagttttttattatttgaaactcacatatatattgcatacaaagctcttgaacaccttgatataacaggcttgtattttttatacttactttttaaattaaattcaaattcatctaatttaaaacaatatactaaaccatacataataatcgcctgtacaatgcatcattaacaagtcactgaaacgcctttcattgtattaataacgtcactataatttttatatcgttcggtttttgtttgattttaatgattatttatacaaaaacagccgtatttcaagccgacattttaaatttaactaaatttgcatctagttaataattgcatttatcaaatttgtcttattgatccaatctaatttgtactcacaaactagtttaaaattctaactttatctctcagttcgttatcaatcatcagacataaaccaatgaagcaatcagaaaacactctaattttctattagaaatttgatttaatataaaaaaacaggcttacttcatataatttatgaaataaacccgtcaatttttgtttaattatgctttgtgattctttttatttctgcgtaataatgctaaacctagaatgctgaataatccgccgaacaacatacctttgtttgttgattcttctccacctgtttcaggtagttcagatttcttagattgtggttttttagttggtgccactgctttaaccttttcattgatttcaataacaggtgttactactttaccttgttccactggtttagaaggctttttaggttcttctttggcaggtggtactggtttaccaggttcagctggtacctctggtgttggcggtgttggagtttctggctcactcggcacttctggtgtcggtggtgttggtgtttccggctcacttggtacttctggtgttggtggcgttggtgtttccggctcacttggtacttctggtgtcggtggcgttggtggcacgattggaggtgttgtatcttcttcaatcgtttgttgaccttcattttggccgcttacttttggaagtgtatcttcttcaaagtcaacactattgtgtccaccgaattgataacttggtttatctttatttgtatcttcttcaataatttcagtgtgcttattgaatccgtgaatatgtggcacactgtcgaagtcgatatcaatgatgttaccgccatgttcatacttaggtttgtctttttctgtatcttcctcgaatgactgattacctttattttgaccatgaatttgaggtacactatcaaaatcgatatctacgatattgccaccttgttcatatttaggtttgtcttcttctgtgtcttcctcgaatgactggttaccgctattttggccaccttcataacctaattcactcttaatatcaacgtggctattttcttcgatttcttcaatcacgtcataattcccgtgaccattttcagttcctaaaccagaatgagaaatatgatgattgtttttagtaatttcctcgactggtccttgtgcttgaccatgctcttcaggtaattcatccactaattcaatcagattactttcagttgtatattctttcgtatcttcaactgttgtatgatcgctcactgcgccagttacaataccttttgtagactcttcgtcaaattcaactaagttagactcagtagtaacctgaccaccacctgggtttgtatcttcttcatattcaacaacatcagcgtgatgttttgaattttcatgtgtagattcttcaaagtcaattggatttgattcctcagaggactcagtgtatcctccaacgtgacctgcttcgctatccacagcagtatggtaatcgatatcaatagctgatgaatccgtttcttctattgtttcaatgtatccatcaacatatccacctccaccatctatagctgtgtggtaatcaatgtcaagagttgatgaatcatattcctcttcaacagtagttactaaattcttatcatattgacctgtaagagtttctttaattgtatcttctttatattcaaatttattattttgaataatcggaccatttttctcatttccgttcgctttattactgtataaaactaaaccattatcccaagttaaggtatatcctctatcataataatacttataaagttgctctggatgtcctaccatttgtgttctaaaatcaacttcatcagtaccatttaaatactctccatcatagtgaacaacataagttttatctagattttctatattcaatgaatagcttccattattttgtaaattcaaattcccactcatattacttgtgacttctttaaatttagaagtatctgtcgtatttgcatatacactcttcgctatgtcttcattattacccaagtattcaaatatcctaacttttggttgatttccattctgattactacctttcattaaagttccagtaacagtcacacttgtcgttttaccattattaggtttaataaatgcaacatgcgaaaatctattattcgctttattaaatgtctcaatcgatccatttaaattggcataataattcccaataccatctttatatttaacatctaattcctttgaagtttgttcttcatttagtgttgaagttatagtttgatttccattagtttgtacagttttaggatcaataaataaattaatttctagttcagccgttacatcaaccttatcttcaatatcatttgtaaatgtatatctaatctttccaccttctaaaacttcacctgtcgccattacgactgaaccatttttaatttctggtacttttctagcagttgatacgccatgcgtatttacattatttgataaagtaaagtcaaagtagtcaccttgatgtaaaccattctcaaatttcaacttatattttagtaccgctcgttgtcctgcatgaggttctactttatttgtattgttatgcccctcaatagaaccaatttctactgtaactttacttgttacatctgtacccgtttccactttcgcgttactagcttccttagcttccgctacatctgctgatcttgtcacacgtggcttactttctgatgccgttcttggctgtgccacttcaacttgtgtttctgcgacttgattttgtgtagcctttttaggtgttaaatctacttgtctttgatctccgctattgtcttgagattgtgttgtttccttaacttgaggtttcgcttcttccttaactacctcttctttaactgtttctatatttgctggttgtgcagtttgtggtgcttgtactgcttttggtgcttcttcagttgttacttgtgttgcgtttgacggttgttctgttactgttgcgttatatgattgagtttcttctatatgattaacgttagttgcagttgtttgtgtttcacttgttttattatcagtagctgaattcccattttcttctactgtagttgtcttttgttctgatgctgcagcttctttgtcttgtcccatcccaacaacgatcattgttcctaagaatactgatgctgctcccaatttatgttttctaatgccgtacctaagattgtttttcactataatatctccctttaaatgcaaaattcattaattttttaaacttaataaatgcaagtctatattgttcggtttttaaaagcaatacaaaaaagcgagttaatgaaaagttaagattgtcattaattttatgttaattgataattttattatttgaaatatacctataaattgtattcaagtcatcagaaacccttgtcacacaaggcttgtattttttatacttattttttaaattaaattcatcattatctaatttaaaacaatatactaaacgtttcataattatcgcctgtacaatacgcacaaaaacatgtcttgaaacgcctttcattactctaaaatacccaatatactttttatatcgttcggattctgagtatttcagacgattttctgcataaaaataaacgtgtttcaaggcaatatattgcaattacctaaaaacacgtttacttaatatttagttaaacaaataagctaatgaataaaatgaagatgatacctgaaacggaaataatcgtttctaataatgaccatgttaagaatgtttcttttacagttaaaccaaaatattctttaaacatccaaaatcctgcgtcatttacatgagacaaaatcacactacctgcacctatcgcaagtacaactaatgcaacatttacatctgatgattgtaataatggtaagacaatacctgtagttgaaatcgcagctactgtagccgaacctaatgcgatacgtagcacagctgcaacaatccatgctagtaaaatcggagacatctctgtaccttcaaacattttagcaattgtatttccgacaccgccgtcaattaatacttgtttaaatgtaccgccaccgccaataatcaataacatcattccgattggataaatcgcattcgtcactgattccataatatgattcatcttacgctttctcattaatcccatcgtaacgattgcaaataatactgctattagcatggctgtccctgctgttcctatcatataaatgatagattcaaatagatttgtaggtttgtcatgcccagttacaagttgcgttatcgtagacactaacattaatatgactggtaatgttgctgttaataaactcataccaaatcctggcatctcttgatccgtaaattctttttgtgcacctaacgctgaaatatcgccttctcgtgtatacgcagacggaatcattttttgtgcaactttgttaaatataggccctgcaatgagtgtaactggaatggcaataatcataccatacagtaatacatctccaacatttgcctttaattcttttgcgatgactaccggtcctggatgtggtggtaaaaagccatgtgtcactgataaagctgttaccataggtagtcctagttttaacactgaaacatttgcgcgttttgctactgtaaatactaatggaatcagtaagactaaacctacttcaaagaacaatgcaataccgacgataaatgctgcaacaagcattgcccattgtacatgtttttgaccaaatttttgaatcaacgtgtctgcgattcgagttgcaccaccaccatcagcaagcaatttcccaagtatggcacctaaaccgaatatcagtgcaatgtggccgagcgtactgcccattcctttctcaatcgtctccataattttagtcaatggtatacctagcattaacgctgtaatcatcgatgtgataattaatgaaataaatgtatttaatttaaacccaataattaatactaataaaataacgatacctaaaacaacactgattaacggccatatttcgttaaacatgacattcccctctttctcttttcaatagaatgtaacaccgtcgtcgcgcacgtattccacataatatatagtagtcatggcacaacaactttatctaagatgcttgagtgacgtatttattgtgttttattttcagcgatatgttggcgttgaaaatctgcaatttgttcataattctctgttaaagaacgacttaaattgataaaaatggatacgatctcttggtaaacagtgacattttcttcaatcggcgtatgattgtttgtggcaccgaccatcgatgaaacgattgaaaaatcttcaatgtcacctacagctttaagtccgagcacgcaggcacctaagcatgaactttcataactttcaggaaccactaactctgtgtcaaatatatctgacatcatttgacgccatacttcacttttcgcaaaaccacctgttgcttttatcatcttaggtgtttcattcattacttcaataagcgcaagatagacggtatacaaattgtaaagaacaccttctaatgcagcgcgaatcatatgttcttttttatgagataaagttaaaccgaagaatgaacctcttgcatttgcgttccaaagcggcgcacgttctcctgctaaatagggatggaatattaaaccatctgcacctggtttaacacgctttgcaatttgagttaagacatcataaggatcaacaccgagacgtttcgcagtttcgacttcactcgctagcaactcgtcgcgcaaccatctcaatacgacaccaccattatttacaggacctccgatgacgtagtggtcctctgttaagacataacaaaatattctacctttgtaatcagtacgcggtttatctatcacagtacgaatcgccccagatgtaccgattgtgacagcaacttctcctttaccaacactattgacacctaaattagaaaggaccccatcactcgcaccaataacaaacggtgtatctttattaagccccattaatgttgcataacgttctttcatacctttcatcacatacgttgttggaactaattccggcaacatttccttggaaatacccagcagttctaatgcctcaacatcccaatctaatgtttctaaattaaacatccctgttgcggaagccattgaataatcaatgatatatgtatcaaataaatgatagaaaatgtatgttttaatatctgcaaacttagcagtacgttgaaatacatcttgccattcatgtttcatccaaaaaatcttcgctaatggcgacataggatgaatcggtgtgcctgttcgctggtaaatcgcattgccatcatgcacttcatttattactgttgcatattttgcagcgcggttatctgcccaagtaatattatttgttaatctttgatgttgctgatccatcgcaatcaagctatgcatttgcgcactaaatgacacaaacttaatgtcgtctttattaactttggattctctcataacatatttaatagtcattagtactgcatcaaataattcatctgggttttcttctgagacatcaacgtttggtgtgtgtaaatcatagcctatttgatgtttcatgataaaagttccattttcatcatataagactgacttggtactcgtcgttccaatgtcgacaccaatcatatatttcatgataaatccttctttctttcattttaattcaaccaaaatccttcaatatctttaccaacatcgtcgaaatttaaatgaaacgcttctttcaaaatttgactgtcgtattgttccactgcatcaataaacacttgatgattatgatgtatgcgttcaaaatcttgcgggttctgttgcatacgttgtcgcatggatgttaaaacgagtgccatcattactggttttaaatgactccaaaatgagtttaaatattgatgattagatgctttgattaatgtttcatgaaattcaaagtcatgcttcgtaaatgattctgcatcctcaaattttactgccactttcatcatttcaagttgtttcttcatttcttttacgataggtagtcgctcttgatttttaactcttgaaaatgcaaatgactctaacatcagtcgcaaatcatacatttctttcttttcttgttccccaaacggcaacacatgtgcacccattctttctaattggatgagttgattttgttgcaataatttaaatgcatctcgaattggcgaacgactcacattaaattgctttgccatttgattttcagtgagtaacgtaccttcagctatgtgaccattcacaatgcctaagcgtaattctgccgcgataccttctccagttgtcataccttccaaccatttctctggatatccatacatcatcaaagtcactccttcattacacgacatacttgtatacaagtatgttaatatagttattatgagtttgcaagcgctttctttacgagcactaaaatagtgaccaccccttttcgatttaaatttaaaggaaatggtcactatcacacgaatgatttaattgttatgttgtatgtgggatatttctaattgttctgtactcatatgcgctttaggtacttcaatgcaataatgcgtttcatgacagtttggacattcgaatcgacgtgttgtcgctgtatgtttcgctttgataactgcccacaaagatggtgagaatatatgctggcagttaggacataaataggcaaccttttgttggtaataaaaagtaacaccaatgccataaccaatcataaatggtaaagcaattaaaaacggccatttatttttcatcaaaattgcacttataatgctagaatattgaattattcctataataccagcactaatccaaatgttacgacgaatacttttcatttcagctgatttactcatgacatgctctatgtcttttaagtgtgtgattggagacgtcgacgcttcatttacgtaatattgaacatttttaattttgtttaataccgcttgttgctgtttaacttgttggttaatttcttgttgtttcatagttagtaaagtattgagcgtcttcaaagtaccttcaccttttagcaacatatctatatcgcttaacgcacaacctaaatctttaagcaataagattaactctaatgtttgtcgctgttgttctgtatacacacgacgctttccttctgtaaatccttgtggtttcaaaatacctttgcgatcataatattgaatcgttcgtgttgtcacattgcataattttgcgagttctccagtcgaatagttagacatagattccacctcctataattaccatagttgatgacccgacgtcacgagcaagtacaatttccacattttaaagaaatttattatactaggcgtcttatttttatgatttcgtaccatgttgatttacaaactcactcaaactaagtaacacacctactaaacatctactctgttatttcagaatgaatttgttgtaatttatcttcaacttcagtaatctctgtcgcacattctttcagtaaatctcgatacttttccgtctctgcattgtttttataacgtattttatgttctaaacttgcccacatatccatacctatcgttctaatttgaatttcaacaggcaatacctcaacgcgttctgctaaaaagactggaatagatacaacgatatgtaaactgcggtaaccattttctttagggtgctgaatataatctttacgttttatcaattgtacgtcttcttgtttaagcaacatctcttcaatcaaataaatatcatctaagtaattacatactacgcgaattccggcaatatccagtatatgttctttggcagtttctgcgctaatctgtaatcctttacgattaagcttttctattaaactacgcatttctttcacacgtcgctccatatgatgtataggattgtgtttataaatgtgattgaaattgtcatctaaaatactcagtttagtgcttatttcctttagtgctgacgaataaatatgatctaactctacgaaacctaataacgtatcaaatgcttcatcaccattttcaaatttacttaaactatttttaaaatcatgtcgcaaatcctctaaatatagtgatggttttcgatctacatacatttttatactaacctccgatatataatcatctttattgtacctaacattttattaagataatactaatacactatcgaactttgggctgatactgaaacagcacaaagaaactcaaacaattcgaattatgtatcaaaaccttcaattacaggaagtgattttaaaatgatttaacgcaaaaaaacacctgttaccgttatataggtacaagtgcttaattgatagagatgttatacgtctttaaatgattccacaacttttggatgtggaccatccataagcggttctctttgtcgaacgccaccactttggttgccaattgattcgctatcaaagtacgatttatcttgatttgattgttcttgaatatgttcttcattatcagttgttgcatattcactatccacctctgttttttccattgttgctgtatggaattgtacgaagttctcttcttctaatgctttgatttcttctttcgataacgctcgataccaatctttcgcttttttcgccgcaataggaacaacatctttttcaagatatccttcttttaacattgcattcgcaatttctatcgctttttgccgtttaattacttcaaattctttccatttttcggggtaacctttcattgtaaagggcattcccttaacctccaatatgttataattcatgttatataccaccataattataaaatgaaacatattaaacacaattttttagactcccgtcataataacttcagacaaacgttagtctgacctgataaatatttaattttaaacgttcttgtctctctcacgaaaaccattgtgttgaatattcatcattgctgattgaatataattatactgtggtaaatctggtaatatctttatttctaattctgtatttaattcgaaatgcttagcgatgttttcaaatattgctaaatactcgcccattaattgttcatttattgtaagtctatcttcattagccatggctctatttaacataaagctaatttcttctaatgcgaataagctaggataataattttgaatcaatgtcttatcactaaataattcaccattagctgcattataaacttgcgtcatgttatttaatttcacagataggttcatagccgtgtttttctgatacacatcatctttatattgattttcagaaaataaataatgaaagagcgttgcttctttacgaacaacttcagccattacattaggaagcaatgcggatgcggtacgttgtccaaggacaaataaacctatgattgcaatcacaatacccattgcaacgtcaataactcttggaaacgcaatgttaattgttaaattctgtgatgctaatccgttcattaaaataacttgtattgtaataaaaactactgcaatcgcataatttgctcccaccaatgcttcagtaaacaatgctgcaatgcccattaaaattactgcaacaggtgttggtattgaaaacaacaatatgactgaaagtactaacacacctaaaatagtacctaaacctcgtgccatacctctctcgattgcatgtatagttgatgttcctagtaatattgtatgtgcagaataacggtatccagtatgctttttcaaaatcaaacattaacgcaataaatatcgctatcatcataatcgctgtatatctcaatgtatttctaaaaacaatagagtctaatgttaaattttgataaatgcgtttactatataaaggttttcgcatgtctgcttcatacgcaatacgcgcttcatttgcatgcaccatttcatcaattttcaatatatggttgaataaattttgaaattcctctgttactgtcacttcttttcgccaatatcttacattttcctcactattatctagttgtgcaatgatatgatccatcatttcaattaactcatctggcaatggtcgaatttgtttagcgttcaactctaacagttcagaataaatcccttgggcagatgtgtgtaataataataatttttggaaacgtctacttaatttatcgttacttgaagtagaagtgattaataatttatcagatgctttaaaactatccaccgctgtttttgctacttgtaaaaaagcagatttatcattataagtgtgtaacaacttagatatgagtttaaaatcattttgaattgcttgttcttcagctttgtttttagaaaatacgatcgtgattaacaccatcatagtggcaagtataccgcctactaaaatcgcaaagcctctatataatgcttcttcgggagctataggtaagttaatgggtagactgaatgtcacaatgaagaatgtcgatgacggtccagctatttttaaggcagtaaatatataaaatggtataaccgtaacaattaataatgtcattccaaaaacgagtggcgttttggctgttagcgtaccaagcatcatacatattgcaaacgctaaattacaaattattacagttcgcagcttagatcgcgacggacctttaaaaacataaatatgggctagtgttccggttgcaactaataatccaaattggaaattaccacataagtaaccgattattgcaggaataatcattaacagtccctgtcttacacctttataaaagtctaagttaagtcgattgatttttatgagtgatgtcaaaaagatgtcatttcgacttctcctttccttgtcaaaatatttccataatctttttattagcatagttaaaatgaatttgttgctataaattttaattacgcaacatatgtcattataacaccttatgctcaattatctaaatttaaaaacttttaaagtccaattaaaattaatttctaatgttatttaacatcgttgaacctttggtcgcccacctttgcgctagttaaaatttatatgtacttttacaagcgttacctgactaatgttttaaaaccttatttctttacatatatcatttcaataacttcattttcatcttaaaccatatctgttttaaaaagtttcaatttcaacgcaaaaaaagcaataagccccaactatgtgaaagcttactgcttgtttaaattatttttctattgctttatcatcactaacaattaaaggttgatctggtttcacatagaaccacataatcacagcgattactgctggaacgattaacaattggaatgtcattgtccaacccaaatgttctacgaatagacctgctaatagcggactgattaatgcacctatattaccccataagttcatccaccctgatactgtaccagagaagttacgtcctaagtcagttgctgcagcccaactcatacccattgaaataccgataccaccaagacctagtgataaccagaaaatacttacatataaatttcctgtgcgtacagcaaagataattgaaactgcaaacacaataaatcctgcaattgcaattacacctctagctacgaattttgaacgacctaatcctaatacacggtcagaaattgcacctgctgataagattaagaagaacattaataaccaaggtaatgaactaatgctcatttctttaaagttaacgtggaatacttctgttaaatacgtcggtaaccaaattaagaataatgtaatgataaattgtacaacaaagtattgaattgcaattgcatagaagctaaaacgtttaaagaaatcattccatggtggtgatgacttttcagtagctacgatatcacgattttccataatgaaacgtttctccgcttcattaaccattctatgttgctcaggtaagtctttggcaataatcgcccataatacagccattaaaatacctactgcaccaaaaatgtaaaatactgcttgccagttaaatgcgttaacaatagcaattgtaactattggtgctaatacaggtccgaaatatgatcctgctaataatgcacttgatgctctacctttttcatttttagagaaccaaaatgaattaaacacagcattagaagggtacattggcgcctcacctacaccaaataagaatctcactaaataaattaaaccgtggttcttaatcatacccgttaagattgtaaatgcactccaccaaactaatgcaattgtaatcatcttacgtggaccgaatttttcagccaacatccccgatggtacttgcattaatgcataacctagagagaagaatgatgccaataaaccaaattgtggttttgtcatccctaaatcatccatcatttgcttagcgatatatgaaatgtttgctctatccatatacgcaataaccccaataaagaagaacgcaagcgcgaacatccaccttacgttagttcgtttttccttcataactattcctacttccctaattaattttttaaaacttaccctgaaacgttaaaattttcggacatctggcatgtccacccctactttgtcacaaaattgtaccaaagttattttttataatattatcagacatggaaagcgtttacaatagaatctataaaaattttattaaattccgcttaacttttgctattaaaacgatataaaggaacttttagttacatagtagcctatcgtttgttaattaaaaatactgcaatcctagtgttttaaaacgtatattgcaggctttcttacatattcgacattcattttaaattgcatataactacattaaccattcattgtgcagcgcctgttgtttagatgatcatttattgactttttgctcttatagcaagcaattttttgatttattgcttataatacattttaagacaaatgtttgtttcaacatcgcatgcgacatcattaattattcatttaaatttatccagtttctatttgtctgcaattgctgaaaattaaaggagcttatttttaataatggaacaaattatcactgaatttattagccgttttgggtatgcagccatttttatattaattttattagaaaatgtactacctatcgtaccatcggaaattattctgacatttgctggtcttatgtctgttaaatcacatttatcaattttaactttatttattattgcaactatcgcatcgtttatagggctgttaattttatattatatctgccgtttgatttcagaagaacgtctatatcgttttattgatcgacacggtaagtggattaaattgaaaagtaaggatttaaagcgagcaaatgattggtttaaaaagtatggcgtatgggctgtatttatctgtcgtttcatacctgtattacgtgtattgattaccattccagctggtgtaaaccgcatgaatgttgtgacatttaccgttatttcattaataggtactacaatctggaatttcggtttaattttactaggacgcactttgagcgatagctttggtatgttgatgactggtcttcatacatattcacgtattatgtatgttgtcatcattatcgcagtcatttactttgctatacgttacattggcaaacgtaagagagtaaaataatattgttgttagcataaaggcatgaattttaaatttctataaacaaaaagcagtgaatcattccatctattgaaatgattcactgcttttttaagtttatttggcatactttagctgaaagtcaactatctttatataaagaaatattactattaacatgatagttatagttgtgaagtaaaaggctaccaacggctgagaaatgataccaattaataatgcaccgacagtcattccaatatatctcacaaaattaaatacacctagcactttcccttttatatgttcaaaccttttagaaattatagtagacagcaaagctggcacaataccaacacaagtacctaatataaatataattactgataatataattacatttgattcgtttaaccatccaaacaataacgtaaatatagcaaatccagttatagtaacacgaagtatcattatttcattatatttttttgaaaatcgcttataaaataaacttcctaatataacactaacagtaataggtaaaaacaaaactcctgatattccaacgcctatatcataggtattatttaataatgttggtaaataaactaatattgaaaagtacgtaaaaaatattaaaaatcccaatgtcactaaagtaataaacactttatcggtcaaatatttttcttcaattttttcagttaattttacaatccctttttcaacatttggaatatcaataaaaaagataatcaaaaataatacgatagatataacgagcaaaaaactaaaaataccaatataatcccatcttgcacctaaagtactccctaagattggtgccaaagctggtgcacatgataaaaatatttgatagttcgccatagcttgagctctaccattatctgtacttagtttggctaataaagttaaagtcacgagaggaataattccgcaaccaattgcttgaaataaccttgatatagcaaataatataaagttatgtgtcactgcacaaataaagctagatatgattactattcccaatcccgttaaaagtacttttttcgaatcacgagaatctatacttctaccaagtacaatttgcataactgcaacgataaatataaaaccgccaactgtcgcatttatccaaaatagtggtacttgaaaatcgtcatatagtctcggaataataggcgtgtatatgttttgaatcaatgatgcgaaaaatgctaaaaatcctagaatatataatctgatattactattaatcatttaaaccatcttctttttttaattcttctatactacggtttaaaaactctataataactgccatttcatcatcatcaaagactttaagtacctcttcatatttttttaccgatttttcatgtaattcatcatgtatataagataatttttttcctttttgtgttaatgaataattaacttctcttttgttaaattcattgtgcgattcaactactaagtctttcgctaaaagtttttttatcgatttagtaattgctggttttgatacatttaacatttcagacaaaaatttattattcactttatcattattatcaatcaactctatgatatgaaattgtgttagagataaatctagttcctcattttcctttttatactgtcttcttttatcggcattttctctttctataataaattgttgtaattttaaaataacttctctcttcatatccactattattcctcctcttcattagttaaccggttaactatattattgttgtcactcccatttttgtcaaatattgttgtaattaacatatatttacttagttatgcaccatttattccgcatttcacaaatccacctataatacaaactatcattttaaataagcagaatttaccctgtcttccacacaaattgttttcgacactttaatgtgcctactatccaaaaaagttactcataacaaattgcgcattttaataaatgtagcaatgccatttgcatgctgcaaaaatactcgtattcatatttatgttttatattattaaagttttttaaatccatatttttataacacttgctatgtgataaaattaattttatatataaaatcttaagattcagattatttaatagcaaaggagatagtgatatggatgttttaacaatagaacatttaacaaagaagataggcaacaaaacgattctcgaagatgtatcatttaagctgaaacgcggacaaatagttggtctcgttggagcgaatggtgcaggtaaaacaactttaatgaaagttatattaggttactctagtttccaaagcgggaattttaatgttattaacagcaaggacagcaaaagcaatatcggcgcattgattgaaaatccaggaatatatccttttatgtctggatatgaaaacttgaagttattgaatgaatcaaaaaacactcaagatatcgataaaattgtctcacaacttcatatggatgaatacattcataaaaaagctaaaacgtattctcttggtatgaaacaaaaattaggaattgctatagcatttttaaataaacctcaattcattatcttagatgaaccaatgaatggcttagatccaaaagctgtgcgagatgtacgtgaattgattgtccaaaaagcgcaagaaggtgttactttcttaatttcgagtcatattttaagtgaattagttaaaatcacaaactctatccttattattaacaaaggtaaaattgttacagaaacatcggaagaagaacttaaacaatttaaagataatgatttagaaaatgtattactagaaatcatagaaagggaggaccaagcataaaatgggaactttaattaaacaagaatgtttcaaattatttaaaaagaaatcaacttttatcgcacctattgtctttattctactaatggttgctcaaggttatattgctacaaaatacaatgaaatttttacgccacaggaatctttcacatctgcttataatggtttttcatggtttgcatttttattaattattcaagcaagtacaatcatttcaatggaatttcattacggtacgattaaaaatttactctatcgtgaatattcaagaacaactatgattgttagcaaaatcatcacattatttattatttctttaatttattttgttattacaattattgcttcaattgttattgggtctttattctttaatgatttaaatatatttgaaagtagcggtaatcaattatctttattgaatcaattattattagttagtttaggcacatttgttggcgtttggttagttttaagcttaacgttgctattatcatctgcaacaaattcaacgggagtagccattgctgtaggtattgttttttattttgcaagttctattttagcagttattcaaacggcacttttagaaaaaatagactggctaaagtggaatcctattaatatgatgaatattatgcttcaaacagttgaaaaaggctttagtaagtcgacaaaattagaacttcatgaattgtttattggtaatattgcttatatttctattttcttaatacttgtagtatttattttcaagaagaaaaatatttagtaacttaaagtattaaatgtctaaatacacacatattccatcgtaattcaaaatcattttcaaatcccttcacccaaataatggtgcggggattttttcatccaaattttggaaattccacattttacatatcgtaattttttaggaaactagtgaatataacaaatccctcctctcatttttaaaatagatatatcacttccccacttttacttaactaaactgcaacggttcctaataccaaaatcctgccctctatttttatcaattcaagcatacttattgaaaaatgttaacgttttcttgataatcattgtaagcgcatttattttataaactaacgtttgaaatatactacaggagtgacacgtaatgactcaaattactgaaaaagaattaaaaaagaagtatttagatttactatcccaaaattttgatactccagaaaaacttgcaactgaaattatcaatttagaatcaattttagaattacctaaaggtacggaacatttcgtcagcgatttacatggtgaatatgaagctttccaacacgtattacgcaacggttctgggaacgtgcgagcgaaaatcaatgatattttcaaagagagactttcaactaaggagcttaatgacttaactgctcttgtctactatccagaagacaaattaaaattgattaaaagtgatttccaaaattgcggtcaacttaatgtctggtatatcacaacaatcgaacatttaattgagttaattaaatattgttcttcaaaatatacgcgttcaaaactgcgtaaagcattgccaaaacaatacgtttatattattgaggaactactgtataaaagtaatgaatatcaaaataaaaaatcatattacgaaacacttgttaaccaagtaattgaacttaaacaggcagatgatttaattattggactcgcttattccgtacaacgcttagtcgtcgatcatttacacgttgtcggtgatatttatgatcgtggaccacaaccagataaaattatggatacactgattaattatcattccctagatattcaatggggtaatcatgatgtgctttgggttggagcctatgctgggtcaaaagtatgcttagcaaacttacttcgaatttgtgcacgttatgataatttagatattatcgaagacgcttatggcattaatttaagaccactgcttactttagctgaaaaatactatgacgcagataatcctgcttttaagcctaaaaaaagacctgacaaacacgaacgtttaactcaacgtgaagaaagtcaaattactaaaattcatcaagctattgcgatgattcaattcaagttagaaataccaattattaaacgtcgtccaaatttcgaaatggaagaacgtcttgtgcttgaaaaggttaattatgatacaaatgaaattacagtttatggtaatacatacccattgaaagacacatgtttccaaactgtcaatcgtgataatccagcagaattactacctgaagaagaagaagtcatgaataaactattattgtcattccaacaatctgaaaaattacgtcgtcatatgtctttcttgatgcgtaaaggctctctttacttaccatataatggcaatttactcattcatggttgtattccagttgatgaaaatggtgagatggaatcatttgaaattgatggtcatacttacagcggccaagaattattagatgtgtttgagtatcatgtccgtaaatcatttgatgaaaaagaaaatactgatgacttatcgacggatttagtttggtatttatggactgggaaatattcgtcactatttggtaaacgtgccatgactacgtttgagcgatactttattgcagataaagcttctcataaagaagaaaagaatccgtactatcatcttcgtgaagatgtgaatatggttcgtaaaatgctcagtgatttcggattaaatccagatgaaggacgcattattaatggtcacacaccagtgaaagaaatcaatggcgaagatcctatcaaggctgatggaaagatgcttgtcattgatggtggcttttcaaaagcttatcagtcaacaactggcattgcaggctatacactattgtataattcattcggtatgcaactcgttgcacaccaacaatttaacgctaaagaaaaaatactttccgaaggtatcgatgaactttctataaagcgcgtcgtagataaagaattacaacgtaagaagattcgtgataccaatattggtaaagatcttcaagctcaaatagatattttgaaaatgttaatgcatgatcgttacttagactaaagacgacatttgatgcatgtatcgtgcacttatttagtggtactgtgtttacgcattggctacgcaaacacgatgataaataggcgacctagctacaccgaaaaaaatcccctcactattgcgagtagtgaggggattggtgtatctatgctaattcctgttaactgtattataacaactttacagcaaaaaaatgcaaaatcaactaataaattaatgaaatgaccgacaccctcgcttctactccaatttaacaaaatactatattagtactatatttttcattaacatgtatgttacattttctatattacttaaaattacgaagggacatttttaaatcatgcgtatcttaaaagagtccattattgtggcatttgcctttgttggtgttgtcgttggtgccggctttgctactggtcaagaaattttccagtttttcacaagtcatggcgcatatagcatttcaggcattattgtaacaggactattgattactttaggtggaatggttgtcatgcatacaggtcatcatctaaagtccagaaatcattctgattcaattaactatttcttatacccctctattgcaagaggttttgatattattttaacaatgtttatgttgtctttagctattattatgactgcaggtggtgcgtcaaccattcatcaaagtttcaacttaccgtattggctgagcgcactcatattagtcgcctttattttagcaacactgtttctaaaattcgatcgtttaattgctgtgcttggcggtgttaccccatttttaattgcgattgtcattatgattgcggtctactatttcacaacaagtcatcttgattttactgccgctaataatgatgctcagattcataagcagaaatcattatcacctggatggtggtttgatgcgattaactatgcaagcttgcaaattgctgctgccttcagcttcttatcagtgatgggtagtaaagttaaatatcgtgactcaacgttatacgggggcttgattggcggtttaatcattacatttttactcatgatgattaatctaggtttaatttctcaattcgataaaattaaacacgtagatctacctacattaaaattagcgacacaaatgtctccgtcaattggtattattatgtctgtcattatgatacttgtcatctacaatactgttgttggattaatgtatgcatttgcgtcacgtttcagcgttccattcagcagacgttacttcatcattattattacaatggctgtcatcacttatattagtacatttatcggtttcatttcattaattggaaaagtattccctattatgggattgttcggtttcatcttactcatacctgtactctataaaggtttaattaagcgtattaccggcaaatctcatatcgattaaaatatctatactattgtaaaatttagtacagcacttcaaaatcaaaaaagcgggcagatgaaaagtaaaaatcttttccatctgtccgcttcttaatagaactgttatttcccaagtatttgttgaccagccgttaatccagtttctgtaatttcatggcccttcacccaaacttcttcgacttgtgccccacgtgtattaaacaagttaatgacttgttcacttgcagctaatggcacaattggatcatgtttccccatagaaagcaacacactgacatctgataaatcctttgttgacgttacttcaactgggtataacggtgcatataacaatgcttttttaaatggtgcttctgaacgcaacattaagttaatcgctatatttgatccatttgaaaatccaacaagtactgctttttcaatatcaaaatcataacgttcagcagcttctttaatgaacgtcaacaattcttgtccacgaaatgccaaatcttcttcatcataaacaccttcaccaagacgtttgaaataacggttcatcccattttctgaaacttgtcctctaatacttaacaagtgataattttcattcaatgcttcgcctaacggtaataaatcgaactcatcaccacctgtaccatgcaataatattagtgttggcgcaccattttgtccttctctaaaaatatgttccatcacaaatcctcctcattccaattaaccatgttgacgcttcgtattaaaaggtctaacttccgattcaatatattctcttttattttctaaaaatggtggtaaggataacccttcgcctaatgtttcataaggttcatcttccataaatcctggtccatctgttgaaatttctattaaaatatgccccacacgtgcatataatgcttcaaaatagaaacgattaacgatgcctgagttattaatacctacctctttatatttcgttgcccacgcttctattgcatcatgatctttcacacgaaatgacacatgatgtacctcaccataaccttgacgtgctgctggccctttatcatcttttattaagattacctggccaccattgcctccttcgccaacttcaagtaatgcgacattatcttcatgcgcaatagttgtcataccgtaaacagtctctaaaatatttttaaagtcgtcaaaataacttactttaatttcaatggggcctaatccataaatcgctttatctactggaaccggtccattcttccaaggtacaccaggtgctaccccttcatttaactcatctgaaattaattgatacacttggccatcgacttcttcaaatggcaacacttttttaccaaataattcttgaataccttcgtgtttaacaccaaactcatcaaagcgctgttcataatatgttaatgcgtcatcgttaggcactctaaaagacggtcttgtaatggaatttgttcctgcctgcccttttgtaatatttggaaaatcaaagaacgtcatgtctgtacctgccgaacctacatcatctgcaaaaaaagtatgatacgtataaatatcatcttgattgactgtctttttaactaaacgcatgcctagtacttctgtaaaaaatttataattacgttctgcatcatctgtcattgcagtaacatggtgaatacctagtaattcatgattatttatcattttatataccctctttatatttttagtgcatttatctcgaaatcgagatactttaatgtaaatttttagtgcacgccttacacttctgtagattgtgcacttagtttcttaaacgcttgttgtaagattgttaattcatcctttgttaacacatcaaacgcttttgttaatgtctcagcatgcttagggaaaatatctgccatttgactttgacctttttcagttaaacaagccatatatacacgtttatcatctttatccttttcacgtgtaatccaacctttgtcctctaattgacttacaacatatgaaatgctgctacttgcaattaatacgcggtctctaatacgttgaattggttgcggacctttattataaagcaactcgagcactgcaaattcagtaatatttaagccatatcgctttacgtcttcttttgtaatttgctctaatgtgtctaacgccctattcattccgacaaaaacattgagagattgtttcgttcgatccatatgatcaccaacttttttattttatttcgatttcgagataaattatatagctgaatagatttaatgtcaagatacgtgttttcatcttcatttcaaactgtgcttaataaaaacgactacatagatgtggcaatgtcgtcacatgactgtcatgcacctttgacttcgtttaagttaaaatagaatagggaaatactataatcaatcatgataggagttgatatgtatgagtaaccttgaaatcaaacaaggcgagaacaaattctatattggtgatgatgaaaataatgctttagctgaaatcacataccgttttgtggataataatgaaattaacattgatcatacaggcgtatctgatgaacttggtggtcaaggtgttggcaaaaaactacttaaagcagttgttgaacacgctcgagaaaataatttgaaaattattgcctcatgttcatttgccaaacatatgttagaaaaagaagattcatatcaagatgtatatcttggttaaataaattttgcgatggtgcaactgtaccatcgcttttttgttcgcatcaatataaaattgcaaaacgactagttattttgcatttcaaactttatgctatcaattcattttcttttctggtatactttttatactaacttatagaaaaatagaaaaagaggcgatgcataatggcatttcacgataaaacagcaacacaagtgacaaacattgtactgaacgtaagagacttagacttaatgacaacattttacaaaaacattttaggactatccgttaaaagttctgacgataatacaaccgtattatctgttgggactggtggccatactctaacgttacatttattagaagacggccgtcagacttccccacgtgaagcagggctttttcatatagcatttttattaccaactactgaggatctagctaacttcttatatttcgtggcacaaaaaaatatgggcatcggcgctggtgatcatttagtaagtgaagctttatatttcaacgaccccgaaggtaatggtattgaagtctatcgcgatagaccttcatcttcatgggaatggcaaaatggcaaagttaaaatggatactttagaagttgatagccaaaccttattaacacatcgtactgatgaaggttggcaaggaatgccagcaaaaggcatgattggacacttacatttaaaaacacatgatttagacgcagcatatcaatgttacattgaacaattaggattccaacatgtgtctgattttccacgtgcgctatttatgtcaacgaatcattatcaccatcatattgctgctaatacttggcaatccaatcaagcaagacaaaacaattcacaaagttatggattaacacatgttgatatttatcaacccgacgcctcaacacatacatttacggcaccagaagggtttgacatcacagttcattcaaatactgaccttgttccagaaaaataatcatccatactttattaatacaattttttcacgcaaaagcctgcgattcatttatgtaatcgcaggcttttttattgctaactttttaattttatatatttagacatacggtattctatttattcttttggtccaacccattcaataacatcttcataagcttggcgtgttttatttttcggtggctcttgttgtctgtagccaaatgcgaccatcactgataaaccaaattgctcagtatctaagatccctttatttgctaaaatgtctgtcactgtatccagactaaaaccttccatcggacatgaatcaatacctaacaatgcggctgtcgtcatcatattgcctaatgcaatatacgtttgtttacttgaccagtcatacaaggcttgatcattatcagaaatatggaaatctgcttggaatgcatcgaatttttgttcaacagctggaatcgtttgtgcctcatattttttaatatctcttaacatatgttgtacatacggtgatcttgacgttacatttttacgcgcaaaaattagcacaaaatggctcgctgtatctaattgttttgctgcgccccaactgtgcgcttttaattcatcacgtaacgcttgatcttgaatcacgacaaacttccaaggttctaacccaagagaacttggagacaatctacctgactctaatattgtttcaaaatcttctttcgaaactttcttttgtggatcgaattgcttagtcgcatgtctgaaatgaaatgcatccataattgtttgattcatattgctcattgaacatagcctcccatttttatatttattgctatacaaattatacttcatgttttaaaaagactaaagtaatccgtttgcaattcactataacttgtgcacatgttataagttttctgcaataaaacacacttttgaattttgggaaatttagtgttataatatatttgtgatatttttcacaattaaattgtggcgtgattttaatgtgcataatctttaatttcactcatttacttttcaatcttttaaaagcgaggtttttaataatgacaaaaattatgttctttggtacgcgtgattatgagaaagagatggcattaaattgggggaaaaagaataatgtcgaagtaactacttctaaagagctattatcaagtgctacagtcgatcaattaaaagattacgatggcgtaactacaatgcaatttggtaagttagaaaatgacgtttatcctaaattagaatcttacggtattaaacaaattgcacaacgtactgctggatttgatatgtatgatttagatttagctaaaaaacacaatattgtgatatctaacgttcctagttattcacctgaaacaattgcagagtattctgtttctatcgccctacaattagtgcgtcgcttcccagatattgaacgccgtgtacaagcacatgattttacttggcaagcagaaatcatgtctaaaccagttaaaaatatgactgttgcaattattggtacgggtcgtatcggtgctgctacagctaaaatatatgcaggatttggtgctacaattacagcttatgacgcctatcctaataaagatttagactttttaacttataaagatagtgttaaagaagctattaaagatgccgatattatttctttacatgttccagcgaacaaagaaagctatcatttattcgataaagcaatgtttgatcatgtgaaaaaaggtgcaatcttagttaacgcagcacgtggtgcagtcatcaatacacctgatttaatcgctgcagtgaacgatggtactttgttaggtgctgcgattgatacttatgaaaatgaagcagcatacttcacaaatgactggactaataaagacattgacgataaaacattattagagttaatcgaacatgaaagaattttagtaacaccacatattgctttcttctctgatgaagcagtacaaaaccttgttgaaggtggtttaaacgcagcattatctgtcattaacactggtacatgtgaaacacgtttaaattaatatatatatttaaaagcaaaggcgcgccatgtgcctttgctttttattttgtatatctgtatcaaaatcgatttgattaaaatccgctttattttatcatctattcaaatgattttagtgcgcttattttactatggcattattgcctaacctgtttgagatatattaatatttgatgattcgtattcaaagttttcatttaacatgtatttagtatcatgatagctgcttcattgatgatatactacctactttttcaacacttcttgttcgataatcgttaatacaccctgcttatcattacttggagcgacagcagaggcaatattgaacaattcttcatcatgactattttccatcacataactatgcttagcgaacgctaacatatctttatcattattcgcatctccgaaggccatgagctctgaaggagacatttcccatttatctaacaatcgttttaatgcctgccctttagtcatgtttggcataataatatcaatgctatcgtgcccacttgagacaagtttaatatcattgctgaattgcgttgctacttcttcgtcaacattcggatgcgtctcacgattaatattaaatgctattttgacataatcatcctcaggtaattgctgtagactgtcaatttcttttaactgatgataataaaatctcgtatcttctttaaacgcttcagaagtatgttttaaaatatacgcgcttttcaaaccacagatgacgagttgatcaatactttgcttcatatttaagtaatcgacaacctgttgaaacacctgacgattaaagcttttataattatataactcattgccattataaataactgcaccattttcagaaataaaatacatatctctatccccgaaaatagacttcaacttcgcatattgattgccactcgcagcaataaatgtaatatctctatttctaagttcagtaaaaatcgcttcaaatctaagtttatcatatgtcttttttgaatctaaaaacgtcccgtccatatctaccgcaatagccttaaccatgattatcctcctcattgctcttttagtcgtcttcattatatccatctcatgacaagcaatgaagtttgtcataccacaatgaacctatattcacattttgaaattgctttcatatatgcaaaacacattacactggatatagcattcagaggcgaacataaatttcagaatattgtaaaaatataacgatatatttatcatttagacaaaatatagtgtgatatactaatttataacatctatacataatgtgaaagaatttttaaaaatacaattaaatatcggtgtaataaatccctttatacataggagttgtatacatgaaactaaataactattctttaaaagttaaaaacaaacaactagttgacaattgtgatttaaatttctatcttggtcagatcaatcacattgttggtaaaaatggtgtaggaaaatctttattagctaaagatttcttactaaataatagtggaaatatccctaagtccatttctcaaaatgtaaccttaatatcaagttcatcaaatattcctaatgatataacaaaagattttttattatcattgttaaaatcaaaatttgaaaacaatcgacaaacattcgataagatttataacatactaaacatcgaagcaataccgtctaacgtactactaaaaaacttgagtgatggtcaaaaacaaaagcttaaattattaagtttcttattggaagatcatgatttaatcatattagatgaagttacaaacgctttagacaagaaaacagttaatgaaatttatgaatttttaaatgattttattcaaagccatcaaactaaaactattatcaatattacacataatttatccgatttaagtgctttgccgggtaaatactttatttttaaagaccttcaaatagaagagtaccaatcaaaagaagaagtcataaatgattacattaatttataattgaggtgtccactttgaaattagaatttaaaaaaagtatttccaataaaattatttacacgcttgttgtgctattcacattccttttcttacttgggtattttttaccaataggtatagacaaagttaaaagtttaagctatagccagtttttcttcagttcatatactgttgcaacgcaattagggttcttactattttcatttgttattgcatattttattaataaagagtattcgaataaaaatatcctgttttataaattgattggcgataatatctttaccttcttctataaaaaggtagcagtgttattttttgaatgtttagtgttcataattctaagtatcactattatttcaattatatattcggatttctcacattacttactattaataatcttattttcactcgttatcttacaatatatcttagttgttggaacgattagtatggtttcacctaacattttaatcagcttaggtatcagcattgtatattggattggttcagtcatcttagttgccattaataaaaatatatttggtatcgttgctccatttgaggcgagcaatacgatgtatcgtgccgtagaaaaaatattgaataacgagtcaacatttatgtgtcctactgaaattataaatatagtatcattcttcgttcttctatttatagttaatactattgtcttattactaagtagaaagagatggttgaaaatcggtatgtagtataaaaaaggagcggtatacattgccgcttctttttattatgtatttttacaatctccaccaatgacacgtcgtcattgctacctcataccaaacaaaaaacagtctcgcaatcaagactgttttccactcaatatattcatccattagcgtaatagattatttgacttctgtagctacaaagattttacgtttttcccaaacgcctgtcttttcattgtaatcatcacaagtaattaatgttaattgtttatctttacctttttgttcatctagaactcctacatctgtaggcttaacatctcttatacttgtcattttatacttacgtgtttcattaccaactttaaagtacaccatactaccttttttggctgctttaagatttgtaaattgatagttcggacggtcaatgaaagtgtgtcctgcaattgaaatattttgatcatctagtgattcattttcttctgcaaagcttacacctctatttaattgttcaggtgttgctggtcctggatatactggttctttaatatcagcatctggaatttcaatatagcctgccactttcgatttatctttcggaatttgaggtttagcttgctgctttttatctttactcgcctgttcttttacatttttatcatattgttcaatcttttcatctttatctttatcgtgaagataattatcgatatgtggtttagcaaacaaatatgctgccactaggataagtaccacaccagcgattgtcattaatcgatttgtccattttttcatacgttaaggctccttttatacatttcacaatgcctgttaacatttcatatagtataccattaatttcaaaatgactcatagcaattcattttatactataaaatttacatgtatacttttacgttagatttcattacacatatttgcattcaaataacgaaacgcttttaataattactaagggggaattgatatgattagatacgctaaaaaagaggatttaaacgctatattagcgatatacaatgatgccattatcaatactacagctgtttatacttatgaaccacaaaccatagacgaacgtgtcgcatggtttgaaacgaaacaacgtaagcatgagcctatctttgtatttgaggaaaatggaagtgtcttagggtttgcgacgttcggttcatttagaccttggccagcatacctatatacaatcgaacattctatttatgtcgatgcttcagctagaggaaaaggtattgctagtcaattactacaccatttaattgtggaagcaaaagctaaaggttatcgtgcgctagttgcaggcattgatgcttccaacaaagcgagtattcagttgcatcaaaagtttgcttttaagcatgccggcacactgaccaatgtaggttttaaatttaatagatggttagatttagcattttacgaattagatttacaagactagtaatgtttgaatcacataatataaacaagacaaccatgttaattcccttaacataacaagccaacatataaaattttaaacttctcaggggagtgggacagaaatgataaagagccactaatgatttattatgtagtggttcttacacattagccacagctaatgtgtacttaaaaataggaatacatgagtaaaactcatgcataagaaatactaatttctatagaaaaagtatttctttatcgtcgtcccaccccaactcgcacattattgtaagctgacttttcgtcagcttctgtgttggggcccaaaaagcttgttacaagcgcattttcgttcagtcaactactgccaatataactttgtagagcatattacattgatttacattgtcccttttatttattcttttcaaatactatccccatagctttgatttaacgctttttctcaataacaaaacgaatatagtagaacatgaaaacgataatcatgctgagcgataaagatttaaataatagattgacccacgttccctcagtcgtatatccatatgtaatcgttgtgttaatgatgaatgctataaagatgattgatagtcttagcatatcatcactccttttaagttattttagatatacgggggcgcttttgcaatcactattttgattagtatgcattttccataaatctttcaacttcttcagagataattaagaagcatctatctggtactaatgatccagacagatgcttcttttttatcaatattttattgttatctcattaattatttttaaccatatcttcagctgtgccaaagattttacgtttaattgcttcgccagttggtgtgcctgctagtccacccaatccagtttcacgtaatgatgcaggaaggttacgaccaaccttatccattgcttcaataacttcatcaacagggattctactttcaatacctgctaatgctaaatctgctgaaattaaagcgttacccgaaccaattgcatttctcataacacaaggaatttcaacaagtccggctactggatcacaaactaaacctaataaattacttatcgctaatgccatagcgtgcccggatgcttctggtgatcctccgaatatagctactgctgcagctgcggccattgcagatgctgaaccaacttcagcttggcagccacctgttgcaccagctacacttgcattgtttgctacgacacgcccaaacaatgctgaagtgaataagaaatcaatcatttgctcttctgttaaatcatgtgttttttctaatttaaaaagtgcaccgggaatggtacccgaggaaccagctgttggcgttgcacaaataatacccatcgcagcattgacttcatttgttgcaatggcacctttgactgcgtcaatcatttcatatccagacaaagcatgatgtgtttcattataatcacgtagtttagcagcatcatgaccagtgtagcccgttacactttcaaccccatcacctgtcgtccctttgattactgcgtctcgcatgacatctaaattttgtttcatttgcgctcgcacttcatcacgtgatttaccgcttaattccatttcttctttaaccatgatatccgcaaatgacatattattttctacggcataatctatagtctctctaattgaatcaaacatgtttattccccctctaatttatataggaaacgtttacgtcactgtatttctctttaattgtatttaatgttgattctgagattgctttatttaatggtattacaaccaagcatttatcttcatctatcttaataaattcatctttacagtctaatttcatatcgttgatatcattgatgaaatgatttacttgtgctttagtcatatttccgtcaacaactaaaattggtaatccatgatttaaatctacttctagtccatttatatgaatacctttaattttaattgtaccaccaccgattgaaataccgataatttcaatgtagcgaccatcattacgagatgatttgatataagcacagtttggatgttgaccaatactatcgccttcttcttcgatgatatctattttaataccatcatcagctgcaatttctaatgaagatttaattcggttatcaaatgttgaatatcccattgctccacccacaatagcgacatctgtaccatgtccttggtgtgtttgagcaaatgattcataataatgtatttcaatatttttaggaatatctcccaatattgcgcgtgctgaattcccaatctttactgcaccagccgtatgagaacttgaagggcccatcataactggtccgataatatcgaaagcactttgataatcatagctctttgccataattaaacactctccttaatatgattctttttgctcggcattttaaagttgatattcattaaattaaacttattaattagtgttccaataatataggctaagacaatgctgacaataatcactgttgcgattgttacaattgatgtcactgcattattaaagccaaacaatacgatggcgcctgcaattggtgttgccatacctttgacacctattactagtccgctaaatgtcacgatacatgcgttgacgaccccaatcagtgcatttgtaccatatagttgtactggatattgcgctattaaatcaatttgcgtcaatggctcaatacaaactgcaaatgcttttgacggtccaccaatgtttaattttcggaataaaataaggttaacaaatgagctacctgtacatgttagtgctccaatagccataggaacacctgtcagtcctaataaacttgttaataccattgaacttagcggtgtcatacctgtaacaggaatcactagtcctaaaatgaccgctaatgcatatggattgttatcacctaccgcagtgacagcactacctatttgttttaatgttgctagcacaccaggtgtaatgattgatgcaagtccgaaagcaattgctggtgcaaataagatcaccacaattaagtccaagccttctggaactttcttttcaatccatttaattaaaaaagctacgccataagctgcgatgaatgctggtaataatttaaagtcatgtaatactaaaccaacaatgaccgcaaatactggtgcaacgcctaagtttaagcacgttagaatacctactgcgataccgcttaaacttcctgctaaatccccaatatcttgtagaaatttaatatcaaatacgccaccaatagcataacttaagaatgcttgtggtagaaatgtcgcacaagctgcaccggataatgcttgtagtccttgtttaccgtacggtgcatactttaaaaatagcgtcatgatcactaaaaccaagactaatgtgcctacacctaacagaatatccatttcccaaaaacctctctctatgtttattttattttcagaccataaacatcgtacacccttaagaaaacgttttcaacttttatctgttatcaaatcaaatatttaagtgaaatatttcatatttgtgaaagatttttaaaatggattgtttcaaaaactacttatgttgtcgttaatatttactaattaactttttactctatatttcaaacagttgtgtgacagttttttgataacttttttacatctgaaagtaagtaatatttctaaaaacttttaatatttatacactttatctttcgagctatttattttttgtttttgtgctgtgtttataaaaccgcacactatattcaaaaataacttattacacatatatttgcaataagataattaaagtaggatattatttttagttttctgataggaatgatgatagtctataggttgaatctttacttttttttaaagctaaatttacatcaacttaacaatggttggttatactgaagatgaaaatatttagtataacttagtggaggcgataaaggtgcaattgagtcattccgttaaagttgcaatttctatctatttagcacttatctttataacgttcacttcttatttagtcattattttatatacgagtatgactggacatgatgtatcacatttcgtgttagatagtcagcattctcatcatggatctcttacgcaaaaacatttgagtcttcctgaaatctcatttaaatagtttatcctctgtgtttcaacattcatttcccatatcgattcatttatctatcatctagaccactacatcttagatgatttttttattttctcatttcactctttcttaaaagtcgatataatgaattaaatcattatcatacaccgacatattttatgttgttggtgttaagttttaaaggggtgagatacttggcgaataatcattcagctttgcgtttaaaaggaattatacttgccattgtcggtgcttgtttatggggattaggtggtactgtttctgatttcttgttcaaatataagaatattaatgtcgattggtacgtcactgctcgacttgtagtcagtggtgttttcttacttattatgtacaaaatgatgcaacccaaacgttcaatatttagcgtattccaagatcgacgtatgttaggcaaattacttatcttcagtatactgggcatgttagtagtacaatatgcttatatggcatctattaatacaggtaatgctgcgattgcaacattactacaatacattgcgccagtttatattattatttggtttgtcataagaggcgttgcaaaactaacattatttgatgtgcttgctattatcatgacactattaggaacatttttattattaacaaatggttcattttctaatttagtcgtcaatcctgcaagtttattctggggtattttagctggtgtagcactcgctttttacacaatttatccttcagacctacttaaccgcttcggttcgattctaattgtcgggtgggcaatgcttatttctggtgttgcgatgaatttacgccatccaatttggcacattgatatcactaaatgggacatatcaattatattatttttaatctttggtattatcggtggtaccgcactcgcattttatttctttatcgacagtttacaatacatatcagcgaaagaaacaacattattcggaactgttgaacctgtcgtagccgttatcgcaagcagtctatggttacatgtggcattcaaaccatttcaaatcgtaggcatcattcttattatgattttaattttattactatcacttaaaagacaacctgaaacattagatgaataagaaaactctgataatcactttagcaagtaactattatttaacaacgtagttaccttataggtgatatcagagttttttattttagttaataatatttttcacttggtataaaaagcgtcgtcgctctggtatcggaaatactggataaatatggaattggtaatatccaggtataaagtcatgttcgatacctttcgcactcaacaattgcgataagttcaaagcatctgggtacagtacttcttttgtaccaacagttaatgtaatacgacctaaaccatctaagtcaccattaattggtgatactttgtagttatctaaaggtgtgtcccctgcccattgttcagctaagaacacactgccatccacacctaccattgggtctttctttaagtagtcaggaatttcaggatgctgcatcgttgcatctaaaactggtgaaattaatacaatatgtcctggttgcacaatatgtttttcttttaacaattgagcaaatgataaagcaatttgaccgcccgcagagtcacccattacaacgatttgtttagaatctgctacttgattcaataaatcatggtacaacttttcaaaaagcacatacgtcgcttgataatcttgatgcggaatcttcggatatactggcatgatgactttagcattgagtgtttctgcaagttcatcaataaattcgaaatgaattttgagtgggtcttggaaccatgcgcctccatgtgcatataatacaacgcgttgatgcttatcttgtttatcgttaacggtataaacggttgaaccgaagtgcttatccacttttactggcatcttaaactgataattggttccctcatattcgcctgctgtctgtggcgccattttttctaatgctttcatcgcttcttctttatacataaaacgacgcttagctctagataatcgtataccttgttctaacatataacttttcacactgcgtttttctttaattctaatatgtgcgtatgctgcaactaaaaatccaaacgcaagtgtagaccattttttacgcatttgtcgtcactcctctttgatgatttctactatagttctactgtaccatgctgattctaattactaccaatatttactgggaaataagttatgatgtctacataatcttagcaatgctaatcatttgcgatattaatgctcatcgacatcgttatttacactatcattcatttgcttaagatgatgttcaaaacgttgcatatcgataaaacgcccttgacgatgcatttcttttccattcataaaaattaaatccacaggtacagtgaaaatatttaattctccagcaatagcttccacctgactttgattaatcacagctaatggcacattgggatatgattgcatcaagtcttcaatttgtggtaaaacggcatgacacacgctacactgatcgcgcatgacatgtacaactgctaacggatattgatgaataaattcacggaatgcttcgacactatttaattgcttaaccatttcgaacaccttcttactttttatattttaaaatgaagtcattattttgttgctaaaatgtcttgaaacacttgtggcacagaggttatcttcttatcactcaatctgtaaaaaccgcctgtctgtgtaccaatacaatgcacgccatgtgcggacacaatttcaaactgaaacacccatttcatcttgcttgctttaactaagtaaatacgacctactggtttgtcatgtattgtgacaggtactttatactctgcttccgttttcataagtataggtgaaatgccttgattgatcattgttgagtaattcatgtgctgattaataaacgctgttctcaaatcttcgaaccatctaatataaacgatattactaacgacacccatcgcatcaatgtcgtaaccattcacttcgatttctttctctgcaactaatagaccttctgttgtcataatgacaaatctccttatcttacaaatagatttaaaatcatgttaatttatttttattactttcatgataaaaatacaagcaattgaactttattacggaaaatcaaacttttcaatgagactattaatttggctagtcgcgaagatgcatttttctaaaatgtgacaaaaacataagcaatgttttctatatctaacactaatatttaacttattatcatcaacacacctgctatacatcattgcgcactaaaaaggcagtagcttcattttaagctactgccttttgtaacgtattctctttcaactcgctacttcgcatacgcactacgaatgactaaaagttcattcatttgatatgctgtttcatttttaatcattatttgactgtcataattagcttacctggatcagcatcttgtacatcttcaatgacaagttctttattttcaagatttgtaataatcattggtgtaacgatgcttggtgcgtgtgctttcaagtatgctaaattcactttcattaatggttgaccttgtgttactttttcatcaacgttaatcagactttcgaatccttcaccattcagtttcactgtatcgataccaatatgaataagtacttcgacgccactttcagattctaatcctatcgcatgtttcgtagggaagattgttttcactgtaccatcaaacggtgctacaatttcacctttttcagggataaagccaacaccatcacccatcattttaccagcgaatacttgatcaggtacttctgataatggaatgatttgaccgatacctggtgcatagatgtctgttgttccaagtgcttctacgtgaactggttcatctgacatttcttcagtcactgtcgtttcacttggtttcgtaatttcaccactcataatcttggccatatcatgtttaatttgatctgattttggaccaaagatagcttgcatattgtttccaacttctaatacacctgatgcgcctaaagctttaatacctgctacatctacttttgatttatcaaccacttctacgcgtagacgtgtaatacatgcatctaaatgtttaatgttttcttttccacccattgcatctaagacatcaaatggtaattttgcgacactagagttacgaatttcagtttcttcatcttcacgacctggtgttttcaatttaaacttacgaattgcaaagtcgaataagaagtaatacacgatagcatatacaataccgactggaataactaataatgcgtgtgaacgatcccagtttaataaaccatataaaatataatctatgaaaccacctgagaatgtcataccaattttaacgcctaataaatgcattactaagaatgatgtaccagctaataatacgtgaattccataaagtactggtgctacaaataagaatgaaaattctaatggctcagtgataccagttaaaaatgcagttaatcctgctgataacattaaaccacccacgacttttttacgttctggtcgtgcatttttataaatagcaaatgccgccgctggtaaaccaaacatcataaatggatatttaccagtagtaaatgcaccagcagtaaatggtacgccatctttcaattgtgccatccaaatacgttggtcaccacgaaccaattcacctgcgtgatttgtataacttccgaattcaaaccagaacggtgaatagaaaatatgatgtaaaccaaatggaattaatgagcgttcaataataccgaatataaacgttgttaatgttaaatttttatttaataagaaattcgataaactatttaatccatcttgaattggtggccacgcaaagcttaaaagcacacctgttgcgattgctacgaccgatgtcacaatcggtacaaatcgtttacctgcaaagaatcctaaaaatggtggtagtgtaatattataaaatttgttgtaacaccatgcggctaaagcacccatgataataccaccaaacacacccgtttgtaacgttggaatacctaatactaaagcatgtgctggttctttcgctgcttgacttaattcttttgcccctttggcatatgagaaaatgtcatcaattgtaatgtgcaacactttccccattgttgcattcataattaagtaacctactagcgctgctaatgctgcaacaccgtctcctcctgctaatccaagtgctgtaccaactgcaaataataatggcaagttatcaaatacaacttgtcctgctgcttccatgaccgacgaaatcattacaatgatatcgttttttaaccatggtgcaatttctactaattgttcgttgtgcattgcgttaccaaacgctaataaaataccagctgctggtaaaatcgcaacaggtaacattaatgctttaccgatacgttgcaattgtccaaacaatttcttaaacatataaacatcccctatctcaatttccgcttccatgtacaaaaaaagcaggcatgaacaaacaagactattctcatagtgcggttgtttgctcatgcctgcattaccagtaacacgcaagtgatatctaattcatagctattatacatatttgtaaaagcgttttcaacaactttttcacaattttatcatcaattcagtacgatcatttgtgataaataaacaaaacggcaattcccattttgttgaaatagaaattaccgtttttatagttcaattcaattgtgataacctttaaatcagttataagaaacgttttgctgccactgaaattggtggaatttgatctaaatctaaatgtttatcttcagtaattgatctaaatgcccacttaccataaccaagcgcttcttcatttacaattttacctggtaatggcgcagcattaggatcaacatatacatctacaatcgttggtacatcttgtgctaatgcctcttcgactatagcatctacttcgctagcactcttaattgtataacctttaccacctgctgcctcagcaaattttgcatgatccatatcagaaaaatcaactgcatattctaattcaccagctgcttgttgttcatatttaataaatgctaactgtttgttattaagtacaaatacagttaaaggtaaatcatattgtactgctgtagcgaagtcttgcattaccatttggaatgcaccgtcaccagcaattgcgatggcttgtctatttggatatgcaatttttgatgcaattgcacctggaagaccgcaacccattgtacctaaccaacttgaaatgatgaacttgttatttacaccaaggtttaagtatcgagttgaccaaactgttgctgtacctacatctgctgaaatcactgcatcatctttaataaatttattgattgatgccattaatcgttctggacgtaatggtttactattattatttttatcttgttccatccatttatcccaaaccgctttacgttctaacgttttgtttaagaatggtctttcagcaacatgtttaatattttcagttaactgatgcaacgcaattttactatctccaacaattcctacattaatattgaaacgatgtccgatatttttaggatttgtgtcaatttgaatggctttaatatttttcttaggtaagtaatccacatatggatagtttgtaccaaccataattaataaatccgcttcctgcattgtttgataagatgttttggtaccgattttacctaagttaccgatactatatggatgatcatccggcaagattgttttagctggtaatgaatgaatgacaggaattttagccatttcaataaattcacgtagctcatctttcgcatgtttcgcacctacaccaattaacatgacaggctttttacttttattaattagtttaaccgcttttttgatgtctttatattttggtgatactactgttggtcttgatgtatctactggtttattcgttgtatctttaattttttcagttaataagtcgttaggacaaataacaacagctacacctttttgttcatatgccgtacgaattgcttcgttaacgatttcaaacacattgtcacctttttcaatttggtgattataaacggctacatcttcacataatttttgtaaatttgtttcttggaatgctttcgttccaagtgctgtactattcgtttgtccagataatattaattgcggtacattatccattttggcatcatacataccatttaataaatgaattaaaccagggccaccgatacttaatgccacaccgattttaccagttaattttgtgtaaccagcagccgctaagcttgctacttcttcatgacgtacatgataaaatttaaattgatctctcactgtacgtaaactatcgactactgcgtcgattgagtctcctggaataccatacaagtgatctatatcccatgcttgtaatgctttaactaatgcttcatttgcttttatttttgccattattactaatagcctccctttctgtctatcattttaaatatctaaattaatagaataataaaattagaacaggtattaacactgaactaataactgcagttaaaatcatcccaattgaactaaatgcaccggattcaatatccatttctagtgctttagctgtgccaaatgcatgtgacgcattcccatacgttaatcctttggcgatagaagattcaaatcttccaaatcttaataacatcgaacctaaaatactaccgattaaacccgttgtgataataaaaagtacggtcatcgtatctgtaccacctagttcatgtgacacttcgatacctactgcggctgttatagatcggggcaataacgttacaatgacgtctttagaatagccaaatgctttaagtgttaagaacactaacatgaaattcagcatgacgccagttaatacacttgcaaaaatgatagagacattgtctttaattttctctctatttttataaagtgggtacgctaaacatacgaccgttgcgtttaaaatatggttgatccaactgccacctttcatatacccgttataactaattccaaagataagtaagacaaaaataattcctaaagatgcaattaatgctggattcaaaaatgggttcggatatttttgttgtaaccttttagcgaaataatataaaacgacagtcaacaaaatcattaataaggcttgcacgtaatcattcataagcgtctacacctttacgatgtttatgtttaacagacattttttcagcaatataacctgaagataatgcaacgatacatgttcctatgataatgactgcgaaaaagagtatataatttagcgtaatttcggaagcaacatccataatacctacaactgacggtatgaagaaaaagaccatcgtctttaataaaaagtttgcaccgtcttctacccaagttagcggtacaatcttaaattgtaatagtaaataaaataaaaatagaccaacaatactgccggctaagggaagatgaaaaatcttttgaatttctgtgccaatataagtaatcacaatgatgattcctagttgtagtagtagtttgattattaattggactttgtgcatggcgccatccctttctaaatatgtctaaattgttacaataactattataaagatggcgtacacaatataaaaatactctttttttatagtttgtattactattttctatggaaacgctctctaaatttcacttcattttcacaaaaaaacactcattatttcaatgacccacgtaatgatgcgccttaaataatgagtgctttattaatatgttagcctaaacggtctttcaaaaattctatccatttcgttgtggcatgacttaattgtttatccttcttccaaacaacacctaattcccaatgtacatgagcatcttcaatgcgtagcagcttcacatctccatttagttgctctgaaattgatgttggtaaaatactaatacctaattcattcgtaactaaatcttctataacatgccattgtgaaatttgcgctacagtattcggaacaaagccaacgtttttagcattttcaataattttatcattcaagtaaaagtctttattaaataaaatgaagtcttcacctgctaaatcttcgagtttaacagtttcatattttgcgagtcgatgctctctgctcacgataagtcgcaaatcttccttatctagggtagtataatcgaaaatatgatgatcgactggcaaagtggtcacgcctatatctacttcatcattgataatttgctgttcaattgttttaccgccattttctatcaaattatatgtaacatttggatattgttgatggaatgcaccaagaatattgataagaatcttcatattcatgactgccgacatgcccatgtttatatgtcctgtttccagtccattcaagcgttccatttcagatggtaaataatcatacagtgcaacaatttctttacttttctcataaaaaatttgacctgcatcggtaagaattaaatgtcttttacttctatcaaataagggcgtgcccatttcattttcaatatctttaattgctttactaattgtaggttgtgcaatatataatgatttggaagcattagtcatgcctccttgcttaacgacttcaataaaatatttcatatgtttgatatccactaacatcatcctaactatttcaacacgtttatttcattatacacaacttcttaaacattcaataaatttagatttataaaattgctttataaaaagttttatgtaaaatacacattcttttatggtattatattaatggctcaagtatattaatcgaggtgaggtattgagcttttacgaatttatgcaaagttttcttggtgatgacacaccattaggtgaattggttgattggattaatcaagatagcaatttccctagagaagtgaagagccatagtgaaatattgtcatattttcgaacaaatccatgtcctgaaagcatctcagtacctgtaattaaacgggcactatcagttttcaaccaattcacaaatgtacaatgatacatgaatacatggagtcacatcatctcatgttagcgctctgattgcagggcgctatttttaatgttattgctacatttagtatattgtgattgctattttctttcagttatagaaccacgtaccttttcttttaaatcattttatattttcccactaatatccgctgttaatcaatcctgacatccttgtatcactatgacaattaattgttaaatacatgaatttctacattttatgaaaaaatccatttttattacaattcaacactttatatgacaacttcattacagttacttttattgttgattgcttacattgttttctaaaaaaaatttgttatcataattaacgttgaataaagaaaaaaattaacttgggagataaaaatggaatataaaaagatactaattcgtttattaattgcttttgcagtacttttctcagcagatttcacttatcaatccgtcgaacaaacgcatcaatcgcatgccgcagttaattattatagtaaaaaccaatgtacatggtgggcatttaaacgtcgcgcacaagtcggtaaacctgtttctaatagatggggcaatgctaaaaattggtattacaatgcacgtaaatcaaaatatgcgactggtcgtacaccaagaaaatttgctgtcatgcaatcaactgcaggatattatggacatgtcgcagttgttgaacaagtatataaaaacggtagtattaaagtttcagaatacaacttttatcgcccattaaaatacaatacacgtgtactaagcaaaaaggcagcacgtaactttaactatatttactaatcaaaaaacttctatcacgaacgcttcaatttcctgtatgcgtgtgatagaagtttttattttatgaaattatattattacttctacaaatttcaaattgccgtaattgaacgtatatttcttcttcaactattatttcatctttagcataatctatatataaaattttatgctattatttaaataattcgctataacttaacatacgttttcgatataaaccttgttctaaatctcaataattttttgctgttttcatcgtcattagttaaaaaaataatttaactgagtttttgagacctgtttaaattgatgactcaaaacctttatccccttttcactcggtttaattgctttaatatttaacacagtctcattgtaattttgctactaagtttgaaatatttcgattcgaatgtgaaacatcatttattattactttcgacagctagaaaaatattgttaaaccaaaactataattaccacttttatatagaactatatataaattttaactttgagacagaactgctagtcaggtttatgaatatatttctttagtttacttgatatacttattggtaaatcattatttatttgaagagcatttataacaaaaagtataatcccagttatagcgattccatgaccatttttatcagtcaaagattcatcaacaaaaactttttgataaatttatatatttgtataatttattatggtagatatctacacccgtatctataacagctacagttatcattgcgtcttatccaaatagtttttaagaaataaatataattcattaatatcatggctatttgtaacgtcagtgcttaagaccttgtcaattattgttttatctgtttctaagagcccctgattttctgcatacatattttgtatatcgctgttaatctcatttaattttttaaatttttttctaacctttttcaaaataaaatgctctttaattccatctcttaaatacatataaatctctattataatctccataaatgtcatatctcctctctcaaaaaacattatactcaatatattaaaaataagaaaggttttttcagaatttttagtattttcagatatttattcttaagtatcttattattacttctttttaacgctagtggaataattaataataattgtatttaaatgcaatgctgttgttctttcatacttacaagcaagtcataagaaatgagaaattaaattcttatatgatgaataaatgatgactgcagaagaaattgctaaaaaaggagtggagtgaggcattctactgttcatattgttaacaaatatcaaaatgataggaacttgaagaatctaagactgttaaaatcgagacaagaagaaactcgttccaaatttgaatcctataatgaattcgtctcatgaagaagttatttacttttcattagactgatttactaatcaaaaaacttctatcacgaacgcttcaatttcctgtatgcgtgtgatagaagtttttatttttgttcatattaatttatctaagcgctacgatggactgacttaaacttttctttaaaatcgctattcgccatttactattgttgtctaatttcttgtaaaatatgttccgctgcttgtgtatttgcacggggttcttttttcaaagcttcagctactttagcaatttcatcaccttttgcccctacaacgatagctaatgatttatattgtaaactcatatgaccttgttgaataccttctgacacaagcgcgcgacatgctgcaaagttttgcgctaaaccaacggcagcaactacatgacctaattcttgtgctgactctacatttagtagctctaatgaagctttagcaattggtaatacttttgtaccaccgccaacgattgccaatgtcataggcacttcaattgtaccaatcaatcgttgacgatcttgatcgtaacgccatgtagcaataccacgatactgtccgtcacgactcgcgtatgcatgcgcacttgcttctgcaccacgcgtatcatttcctgttgctaaaacaacagcatgtatgccattcataacacctttattatgtgttgctgcacgatgaatatctacttgggccaatacagaagcacgttccattcgtttggcaacctcttctccagttctctcgccccttgctaaatctttaacatcaatttcgccttgaactttaacaacggacgctgttgcatgattggataaaatactcattaaaatgtcgctttgcggaaattcattttttaaaaatgcagttatggcctctaaaatcgtattaagcatattagcgcccatagcatctttcgtatcaacaaatacttttaaagatagtaactgttgctcaggaaatgtatcaatcgctatacgttggtaaccaccaccacgcgctttaatagaaggatatgcctcatccgcaattttatgaatttgcttttctaaagctttaatgtctgctgataatttttcagtatcgtcaacgccatcaaagacgatttgacctatcataatacgttcagaagataccgttttaaatccgccagtctgattcactagctttgcaccataactagctgcagcgacaactgaaggctcttccaccatcataggtacaacatatgccttatcgtccacaatgatattcggtaataatccaacgggtaatgcaccttgcgcgatgacattttcaattaaactattggctacttcttcatcgattaatggatgattcagtaaaatgtcgaattgttcttctgataaccattgcttatcaaccaattgttgtaacttttctttacgagataaatgtcgaaaattcttatctaaattttgcatggacgtactccttttacttcacataatttttaacatttcaatcactactatttttaccacaaaataacgtcattcgtcttaaaattcaattgaataattgtcgttttgactttaaaataaaacaaggtaaattaaaacgcttacaagaaacgacaaatcatttttaaatttagtatatttctttgtataaaattagcatattctgatatgatacaagtgttgcttttataaatttgaaaggatgtaaaaccttatgacaataggtatcgataaaataaacttttacgttccaaagtactatgtagacatggctaaattagcagaagcacgccaagtagacccaaacaaatttttaattggaattggtcaaactgaaatggctgttagtcctgtaaaccaagacatcgtttcaatgggcgctaacgctgctaaggacattataacagacgaagacaaaaagaaaattggtatggtaattgtggcaactgaatcagcagttgatgctgctaaagcagccgctgttcaaattcacaacttattaggtattcaaccttttgcacgctgctttgaaatgaaagaagcttgttatgctgcaacaccagcaattcaattagctaaagattatttagcaactagaccgaatgaaaaagtattagttattgctacagatacagcacgttatggattgaattcaggcggcgagccaacacaaggtgctggcgcagttgcgatggttattgcacataatccaagcattttggcattaaatgaagatgctgttgcttacactgaagacgtttatgatttctggcgtccaactggacataaatatccattagttgatggtgcattatctaaagatgcttatatccgctcattccaacaaagctggaatgaatacgcaaaacgtcaaggtaagtcgctagctgacttcgcatctctatgcttccatgttccatttacaaaaatgggtaaaaaggcattagagtcaatcattgataacgctgatgaaacaactcaagagcgtttacgttcaggatatgaagatgctgtagattataaccgttatgtcggtaatatttatactggatcattatatttaagcctaatatcattacttgaaaatcgagatttacaagctggtgaaacaatcggtttattcagttatggctcaggttcagttggtgaattttatagtgcgacattagttgaaggctacaaagatcatttagatcaagctgcacataaagcattattaaataaccgtactgaagtatctgttgatgcatatgaaacattcttcaaacgttttgatgacgttgaatttgacgaagaacaagatgctgttcatgaagatcgtcatattttctacttatcaaatattgaaaataacgttcgtgaatatcacagaccagagtagtcggtgtatttaaaacacatataataaaacctaaaagcagcagtaagaccacttctaattgaaatcgtcttactgctgttctctatttataacacttcgtattgaatgaattcattatgcctatttgacacattattgaagttttcctaatgcctggatcctttatacgttacggcttcgtgctatgttttggtacataaagctttgacatatcgatattctccaactctaacagcttaattttattattaatcgttccaccgaaccctgttaagctacccgttttaccgacaacacgatgacatggcacgataatagataatggattacttccgactgcacctccaaccgcttgggctgacatttttggcttgttaagcagcttgcctacttttttggcaatagcaccatacgttgttagagtcccataaggaacctgtcttaattcattccaaacacactgttgaaaatgactacctgttggctttaaaggtattgtgatttcaggattgtcacctttaaaatacgcgtctaaccactgtgtcgcctctctaaatatcgctaaagacgtattttcttccctagtaccatcaccttgttgattttcaaacaaaacagcggtcagacttaccccatcactcaaaagttccaatcgtcctacaggcgaatcatagtaactcttatactccataaaaattccccctttttctaatcatacgccttaattgttaaattagaaaatattcatgttcacattttttaaaaataaataagtcgtcaattacgtatataaacacgtaataccagctatcactttgctgcaatatacagttacatatcttactacacgtgctaacctcttactttgtaaaccaaatcttaaattaaaatattgaaaatgcaatgaatccttaatattttattaaacctataattacttattaaaaataacacacaatattcataaagttttaaaaatattctgttttatcacctactattagtggaaaagtacaattgcaattgtatatagtttgcataacgcttcaaaagtaatttcttttttgtttagttcaaaaaaatttagaggtgatgttatatgaataacggttttttcaatagcgactttgattcaatttttcgaagaatgatgaaagatatgcaaggttcaaatcaagtcggaaacaaaaagtactatattaatggtaaagaagtttcacctgaagaactagcgcaactcacacaacaaggtggcaatcactctgctgaacaaagtgcgcaagcttttcaacaagcagcacaaagacaacaagggcaacaaggtggcaacggcaattatttagaacaaattggtcgtaaccttacgcaagaagcacgtgacggtttattagatccagtcattggtcgtgataaagaaattcaagaaactgctgaagttttaagtagacgaactaaaaacaatcctatattagttggagaagctggtgttggtaaaactgcgattgttgaaggtttagcacaggcaatcgttgaaggaaatgtaccagcagcaatcaaagacaaagaaattatttctgtagacatttcatcattagaagctggaacgcaatatcgtggtgcttttgaagaaaatattcaaaaattaatcgaaggtgttaaatcttcacaaaatgccgtactattctttgatgaaatccatcaaattatcggttcaggtgccacaggaagtgattcaggtagcaaagggttatctgatattttgaaacctgcattaagtcgtggtgagatttctattattggtgcaacaacacaagatgaatatcgaaacaatattcttaaagatgctgcattaacgcgcagatttaatgaagtgcttgttaatgaaccaagcgctaaagatactgttgaaattttaaaaggtattcgcgaaaaattcgaagaacaccatcaagtaaaattaccagatgacgtattaaaagcatgtgttgacttatcaattcaatatattccacaacgattattaccagataaagcaatcgatgtgttagatattacagcagcacatttatctgcgcaaagtccagctgtcgataaagttgaaactgaaaaacgaatttctgaattagaaaatgataaacgtaaagcagtaagtgctgaagaatataaaaaagctgacgacattcaaaatgaaatcaaatcattacaagataaattagaaaatagtaatggtgaacatactgctgttgctacagttcatgatatttcagatactattcaacgattaactggtattccagtttctcaaatggatgataacgatattgaacgtttaaaaaatatttctaatcgtttaagaagtaaaatcataggtcaagatcaagctgtagaaatggtttcacgtgcaattcgccgtaatcgtgctgggtttgatgacggcaaccgtccaattggcagtttcctatttgttggccctactggtgttggtaaaacagagcttgctaaacaattagcaattgatttatttggtaataaagatgcactgattcgacttgatatgagtgaatatagtgacacaacagctgtttcaaaaatgattggtacaactgctggttatgttggttatgatgacaattcaaatacgttaactgaaaaagtacgccgtaatccatactcagtcattctatttgatgaaatcgaaaaagcaaatccacaaattttaacattgttattacaagtaatggatgatggtaatttgactgatggtcaaggtaatgtcatcaactttaaaaatacaattattatttgtacatcaaatgctggctttggcaatggcaatgacgctgaagaaaaagatattatgcacgaaatgaaaaaattcttccgccctgaattccttaaccgcttcaacggcatcgttgaattcttacatttagataaagatgcattgcaagatatcgtcaacttattattagacgatgtacaagttacattagacaaaaaaggtattacgatggacgtttctcaagatgcgaaagattggttaattgaagaaggctatgatgaagaattaggtgcacgtccattaagacgtattgttgaacagcaagtacgtgacaaaattacagattactatttagatcatacagacgttaaacatgtggatatagatgttgaggataacgaattagtcgtaaaaggtaaataacgacactttaacatatcgcgcatcaaaaatgagcatcaggtcgcccttgcctgtgctcatttttttaattatttccctggaaaatgattcgctgtgtgctgttctgttccacaacaatcacgattaatgtcacatgtaccacattttccttgttttgaacgcttgaaaaattttactagtgtatataaggcatatccgaaaattgctaaaaaaattaaaatgttaataatgactgacactttaaccactccttaaacaaataaatgtccgacttgataaaaaatgaatgttaagacatatgcagtgactagaggataggcaactgcaagtgccgtccatttccatgaataagtctctttacggattgctgctactgtagaaacacaaggaatatacaatagtataaatatcataaatgcatacgcagatagcggtgtgaattgattttgaatcacattaacaaggcctgcatcacctgatgaatagataatcgccatcgaacttacgataacttcttttgctaaaaatcctggcactaacgtagcacctgcttgccatgttccaaatccgagcggttgcactaacataccaaagaaactaccaaccatatgtaaaaaactttgattgatattcacattgataccatgtggtcctacataacttaatagccaaatgactactgagccgccaaaaataaatgtacctgctttacgaacaaagcccttagccttttcccaagtactacgccacaacgttttaatggaaggcacacggtatgttggcaattccacaataaagattgcattatcattttttaaaatcgtcttagtaagtactgtactgactaaaaatgccataataatacctaaaacatacaggcttaatactactaaagattgattctctttgaaaaagatacctacgaacaacgcatacactggcagtctagcagagcatgacatgaatggtgcaattaatatcgttgttaaacgctctttttcattttcaatactgcgcgcagccataatactcggtacattacaaccaaatccgataatcattggtataaaagacttcccgcttaaaccgaacgattccataatacgatccattaaaaccgcaatacgtgccatataacccgaatcttctaataaagatataaagaaaaagagcacaacaatttgtggtacaaagactaatactgatcctacaccagcaataatgccatctgtaattaaatcttgtaaaaatggtataacaccaagataattcataatcgtcttcacactatctgtaaatgtaccacctataaatgcatcgagttgatccgacaaaggtgtgccaatccatgtaaatgtagtttgaaagatcaaccacataattgctagaaagataggcatccctatatatttatgtgttaatatcttgtctattctagagctgaaatattgcttatcttcatctggatacgttaccacgtcttgcaataacgtctcaatataatgattgcgtatacgctccatctctcgacgaacagatacagcccctacttgttcagcaacttgatcacgtaaactcgacaatttatttacaacctctgaattaagttcgtttgcaatttgcatgttatttaataagaattgaatcgcaataaacctagcttgatacttatcatgagatgtctctgtcattattatttgacacatatttttaattgtctcttcaatcttctcaccataattgattttaaaatgcggttgatacccttcccctagatgctttatttcgccaagtaaatattttgttcctttgcctgtacgtgccacaactggaaaaataggtgtttttaactttttcatcaatttatgataatcgatttttatcccgcgctttgtagctacatcaatcatatttaatccgatgtatattggttgattaagttctaacaattgtactgttaattgcatatttctttttagttgactcgcatcaacaatgttaatgattcctgaaaatgaatcgtttaataaatagtctgtcactacagtttcatctttagaaatcggcgataaatcatatgtacctggtaaatcaattaattgtcctacattttctttaagtttccctacttttttctctaccgttacgccactccagttgcctatatattcatacgaaccagttaaagcgttaaacaaagatgttttaccaacattaggatttcctaaaatacaataattttccattcgtccggctcctattcttctaatgcaatagaacaagcatcgcaatgtctaatacttaactgttgtccgtttacttcaataatacatggccctttaaataaacatttttgtttaatcgttatgatagcgtcatctgttaacccaaaggcacttagacgatacaacatattctcattagcaatatccattcgctttattttataagccttattcatttcaccatttttaatgtttaacatactatttcgctctcctattagaaataataatcattatcacttaaaaatcataacccttaaaattgtagctcgcaatactttatttaaataattttcatttttcatgtaaaatttgtgacattgcaaaaatgttttgtataatcacttccatgcaaaaaacctccgcttcaaatgtcattgatagacatttaaagcggaggcatgtacatgttattttatgatttatttcgtagatttttttctaacaattgattgagcttttcaatatttttattcaactgttctatattcgttgcttgttgttttgaatttagttgatgcttgttttgataatctattaaagcatcatataagaacaatgaacttgctgattgctgtttcacttcttggtacaatgccatcgttttatcatctagtactattgaatgtgcatcatcttgcccatgtgcatcttgatgtttcgatacatttgttgcaccttgtggatatactttaaaggttgtgtcgtatgtttccttactatctttagcttcagattcctgtgattcaaccgttttatatttttcaagtgcatgtccttcaatatcaactcgtggaataatgcgattcaaccatgctggtaaataccacgaaccttttccaaacaatttcgttaatgcaggaattaacatcattctgactacgaaggcatcaaagagtacaccaaacgctaatgccatacccattgatttaatcatgacatcttcttggaatacaaacgcaaagaagacactaaacataattaatgcagctgctacaataacaggaccgctttctttcaatcctactttgatagaataatcattatcccctgttttactatattcttcatgaattcgcgacataaggaagacttcataatccatcgctaatccaaataagatacctatagtaataaccggtaaaaatgctagcattggtcctgtcgtttcaataccaaacagacctttcataaaaccatcttgcattactaatgttgtaaatcctaatgttgccattaatgacaagacgaatcctaaaactgcttttaatggtattagaattgaacggaagacaatcattaataagaaaaatgctaatacaacaatgactgaggcaaataaaggtatcgcctcatttaactttttagacatatcaatattaatgacactttgtcccgaaatctccgttttgaacccatatttatcttgtgcatctttatgataatctcgtaaatcatgcactaaatcatttgtactctctgcattaggcccttgcttaggtatcacgaccatcaaagcgtaatcattatctttactcatttgtggtggcgtaacgatatctacatttttcttatctttaatatctttatatacagactgtaaatcttgttgtaatccttgtggatcatcctttttatctttcacatttatcaacatcggtatttggccattaaatccttcaccaaatttatccgagataatatcgtaagcttttttctgtgtagaatctgctggtttaacaccgtcatctggaataccaagtcgcatatgactaactggtattgcagctgctactaatatgattaaacctagtaatactgccgcaagtgcatttcctgtaataaatttagaccatggcgtatcaatatcttttttgaatttagactgtaatttattcactttaatgcgtttatggaaaatgcttattaatgcaggtaataaagttaaagcgctaagtactgcaaaaacaacactaattgccgaagcaaatcccattaccgctaagaagtcaatgcctactaatgataaaccacatactgcaattacaactgttacaccagcaaaaacaactgcactacctgctgttcctattgcaagaccaatgcctttaatgtaatctgtttcagttttcataacttgtcgatatctgaataaaataaataatgcataatcgataccaactgctagtccaatcattacggctaatgtcagtgtgacatttggtatatcgaatgcataagttaacaaactgataatacctacaccagaggctagaccaatcaatgcacttataattggtaatcctgcagcaatgactgaaccgaatgtgattaacagtacaacaaatgcaacaataataccaactagttcagaattaccgcctacttctgtagatgtcattcctgtaccagttaactctgtttgtacattatgattgtcacgtaagtctttcaaatgacttttaacattatctctagagccatcttttaaagatgtttgactaacgtcatatgtgatatctgcaaatgcagttgttttatctttactaatttgcttattttcataaggatctgatattttatcaatgtgcttgtcatcttttttaatatcatctaacgttttcttaatatctttagtaatgttcggttgcacaataccatcatctttagtcgtcttaaagacaacacgtatttgtgccttttcactatcttgattaaaatgtttttcaatctttttattcgtatctaacgactctaatcctgtcattttaatatcattgtcaaatttcggtgcatttgtagcaagtggtatcaatattgcagctacaatcactatccatgcaatgaccgcggaccatttatgttttgcgatgaatgtccccatcttatataaaaattttgccaaagtatattgcctccttttaaaatcaacgttatagtttaaatatacagtgtagattattgttcgattatagtatctatccccgacctcttaaagaatcaattggaaaattttgtatattaaactacacacaaaggagaaatgtagatgaaagagactgatttacgagttataaagacaaaaaaagcattgtcgagtagcttgctacaattgttagaacagcaattattccaaacgattactgtcaatcaaatttgcgacaacgcactcgtacaccgtacaacattttataaacatttttatgataaatatgatcttctagagtacttgttcaatcaattgactaaagactactttgctagagatatcagtgaccgtcttaatcatccattccaaacgatgagtgatacgattaataataaagaggatttgagagaaatcgcagaattccaagaagaagacgctgaatttaataaagtattaaaaaatgtctgcattaaaattatgcataacgatatcaaaaataatagagaccgtatcgatattgacagcgacatcccagataatctcatattttatatttatgactcgttgattgaaggttttatacattggataaaagatgaaaaaattgattggcctggcgaagatattgataacattttccatagattaatcaatattaagattaaatagtagatgagaaactcatgagcgttaccaacattcataataaaaacgatagtgtacacgttaatgaattcgtgtactactatcgttttttatttttatcgtgcttatcgctattaaaacaactgatacacaacacataaactatgaagaaaaaaataaatccgctatctaaatgactttgactcagttgtttaaatgaccaaattgctaatacaattcccattattattgaaataacgtatctcacattcttatacctataatccttttctaaaaatatggttgctattacttaatttttaaagttataaataaaaagagccaaccgcaatggatggcccttgttcattatgaagcattagaacatttctgaaacaaccttttgttctaagaagtgtaataagtagtctggactacctgttttagcgtccgtacctgacattttgaaaccaccaaatggatggtatccaacaactgctgaagtacagcctctgttaaggtataaattgcctacatcaaattcgtttaccgctttaatccaatgctcgcgattatttgtaatcactgcaccagttaaaccgtaatctgtatcatttgcaacctcaattgcttcatcaaaatcgttaactttcacaaagccaacaactggaccaaaaatttcttcttgcatgattctatctttagatttaagtcctgaaatgattgttggttctacaaagtaaccttttgaatcatcagtgccgccaccttgttctaatttaccttcttctttaccaatctcaatataatttttaatcttatcaaattgttttttattaataactgggcccatatacgtattgtctacagtattgcccaacgttaattcttttgttaatttgattgatttctctaatacttcgtcataaacgtctttatgcacaattgcacgtgaacatgctgaacatttttgaccagaaaaaccaaatgctgacgttacaatagcttctgctgccatatctgtatcaatattttcatcaactacaatggcatctttaccacccatttcagcgataacacgtttcaagaagttttgaccttcttgaacaacggcactacgttcataaattctagtacctgtcgcacgtgatcctgtaaatgtaacgaaatgcgtatctttatgatcaactaagtaatcaccaatttctttcggatcaccaggaacaaagttaactacgccttttggtaatcctgcttcttctaaaatttccattaatttataagcgatataaggtgtatcctcagcaggtttcaataacactgtattacctgccacaactggtgctaaagttgtaccagccataatcgcaaacgggaagttccacggcggaattgtaacacctgtaccaattgatttatagaaatatttattgtgttcaccttcacgatcaagtactggcttaccttgagccaagtccatcattgaacgtgcatagtattcaataaaatcaataccttcagctgcatcaccaactgcttcatcccatggcttacctgcttcataaaccataattgctgcaatttccgcttttcgacgacgaataattgccgaaacacgtaacataagctctgcacgatcatttgctgaccatgttttccaagatttataagcttcgtttgctgctttaaacgcatcttcaacatcttgttttgttgcctttgatgcatttgcaatcacttgtgatgtgtctgcaggattgattgatttaattttgtcatctttgaaaatcttctctccattaatcactaatggtatgtcttgacctaattctttttccacgtctttcaatgctttcttaaacatatccacattttcttggactgaaaaatcgtaaccaggttcatttttaaattctactaccatgtacacttaccccctataaattttgaaagtggtttaaccctttgatttaatgatataacatcatttaaactcattttactatgattaaggttagttttgcaatcgctttcatttttatgttttatcacttattctcaagtattttgaaattgattggttactttttaaaatttatatgggtcgcaactgctactttatcgtttcgtcatttaatgtttcggatggtaggtcattatcaattttacgaacgactttacaagggtttccaaccgctaagctgtgtggcggaatatctttagtgacaacactaccagcaccaatcacactgccttctccaatcgtcacccctggtaacacggctacatgaccgccaaaccaagtattactgccaatatgaatgggtccggctttttcaaaaccttcatttctatgatggaaattaagtggatgtgtcgctgtgtagaatccacaattaggtcctataaaaacattatcgccaattgtaatctgtccaccatccataaagtaacaattggtgtttacatagacattttttcctagtttaacgttccaaccataatctgtatcaaaaggaatcgaaatacttacattgtctgttgttgtttgaaataattgatcaattaattcctttcttttatttgtagcactcggtcttgtatgatttaattcaaagcaaatatctttcgctcgtgcacgttcattgattaagtattgatcaaagtttgcatcgtaccatttttctgctaacattttttctttttcagtcattacacctttcaactcctaataacttatttacttgtttaaaagttaatcaaataaaccttcgcctatgcaactaatacgctataacattatgaaatcatgaccttatcacccttatctatacaattctcgcatcaaatactgctaaagtagtagataaattcaatactacagacgcattcattttttaatctattaacgtacaatgtgagtaagagaaatataaaggagtatgatagcgatgagaatattaattacaggcacagttgctatcttaatcattctaggtttggtcaaaacgatacaagattacgaaatgacaaacgacacgagtcgtcagttgtcagacaacaaagatgatgataaagtcatccatcttaataattttaaaaatttacatgcgaaagaatttaacccatctgatttcttttaagtcacctaagaattgcaaatccagaagtcatttaagttttacctttcattcatacatcctttaatattaattacgacttcttttatatagatgctaagtagagagattgttgtgcaatgtttgcacggcaatctctctttttctttttaaaattggtaaaagtaaaacgcaacgattgacttatatacctatagggggtacattagacgtgtaacaatgaatcacagggaggcaataatgtggctaatacgaaaaaaacaacattagatatcactggtatgacttgtgccgcatgttcaaatcgtatcgaaaagaaactgaataaacttgatgacgttaatgcccaagtgaatttaactacagagaaagcaactgttgagtataaccctgatcaacatgatgtccaagaatttattaatacgattcaacatttaggttacggtgtcgctgtagaaactgtcgaattagacattacaggtatgacttgtgctgcatgctcaagccgtattgaaaaagtgttaaataaaatggacggcgttcaaaatgcaacggtcaatttaacaacagagcaagctaaagttgactattatcctgaagaaacagatgctgataaacttgtcactcgcattcaaaaattaggttatgacgcgtctattaaagataacaataaagatcaaacgtcacgcaaagctgaagcgctacaacataaattgattaagcttatcatatcagcagtattatctttaccactattaatgttaatgtttgtacatcttttcaatatgcatataccagcactatttacgaatccatggttccaatttattttagctacacctgtacaatttattattggatggcaattttatgtaggtgcttataaaaacttaagaaatggtggcgccaatatggatgtacttgttgctgttggtacaagtgcagcatatttttacagtatttatgaaatggttcgttggctaaatggctcaacaacgcaaccgcatttatactttgaaacaagcgccgtactaattaccttaatcttattcggtaagtatttagaagctagagcgaagtctcaaacaaccaatgcgcttggcgaattattaagtttacaagctaaagaagcacgcattttaaaagatggtaatgaagtgatgattcctctaaatgaagtacatgttggagatacacttatcgttaaaccaggtgaaaagatacctgttgatggcaaaattattaaaggtatgactgccatcgacgaatctatgttaacaggtgaatctatccctgttgagaagaatgttgatgatactgtaattggttcaacgatgaacaaaaacggtactattactatgacagcaacaaaagttggcggggacactgcgttggcaaatattattaaagttgtcgaagaagctcaaagttctaaagcgccgattcaacgattggcagatattatttctggttatttcgttcctatcgttgttggtatcgcactattaacatttatcgtgtggattactttagttacaccaggtacatttgaacctgcacttgttgcgagtatttccgttctcgtcattgcttgtccatgcgcattgggacttgctacaccaacttctattatggtaggtactggtcgcgctgctgaaaatggtattttatttaaaggtggcgagtttgttgaacgcacacatcaaattgataccatcgttttagataagacgggtaccattacaaatggtcgtccagtcgtgacagattatcatggtgacaatcaaacgctacaactacttgctactgctgaaaaagattctgaacacccattggcagaagccattgtcaattatgcaaaagaaaagcaattaatattaactgagacaacaacatttaaagcagtacctggccatggtattgaagcaacgattgatcatcaccatatattggttggtaaccgtaaattaatggctgacaatgatattagcttgcctaagcatatttctgatgatttaacacattatgaacgagatggtaaaactgctatgctcattgctgttaattattcattaactggtatcatcgcagtggcagatactgtcaaagatcatgccaaagatgctataaaacaattgcatgatatgggcattgaagttgccatgttaactggcgataataaaaacactgctcaagccattgcaaaacaagtaggcatagatactgttattgcagatattttaccagaagaaaaagctgcacaaattgcgaaactacagcaacaaggtaagaaggttgcgatggttggtgacggtgtaaatgatgcacctgcattagttaaagctgatatcggtatcgccattggtacaggtacagaagttgccattgaagcagctgatattactattcttggtggcgacttgatgcttattcctaaagccatttatgcaagtaaagcaaccattcgtaatattcgtcaaaatctattttgggcattcggctataatattgccggtatccctatagctgcattgggcttacttgcgccatgggttgctggtgctgcaatggcactaagttcagtaagtgttgtcacaaacgcacttagattgaaaaagatgcgattagaaccacgccgtaaagatgcctagattccttaataatgaaggattcgttggtgattctgagataggctagtgattggctctataatgtcgcggtttacagttggatcttcgctccaactgcatatatagttacacttttcgcttggcgaattagtgtatcttacctaatagctccgcctattaggttccatcattattataaataataagtacactacggtttacagttggatcttcgctccaactgcataagagccactaattattataaataataagtggctctaaaaggaggtgaatgctatgtcacaagaaattttaaatgttgaaggtatgagctgtggtcactgcaaaagtgctgttgaatctgcattaaataatattgacggtgtcacttcagctgacgttaaccttgaaaatggtcaagtaagtgttcaatatgatgacagtaaagttgctgtatctcaaatgaaagacgcaattgaagatcaaggttacgatgtcgtttaattaggcaatattcaacgtcatcaacaccaaattaaaaaatcgaactgatgagaatcccaacaatccaaattatctcatcagttcgatttttaatttactcgtaacctagtatctccagtctgcaatacatctaatgttgcatctaatgcatcgacaattagatttttaactgcagcttcagtataaaacgcaatatgtggtgttaatatgacatcttccctgtcaatcaacgattctaacaatggatcgttcagtgttttgcccctttgatcacttgggaaaagtttgcgttcaaattcatacgtatcaagtgctgcacctttaatcacaccattgtctaatgcgtctaataacgccttagtatctactaaagaacctctcgcacaattgacaaatactgcgccctttttaaaatgtttaaataattcagcattaaatagataatgattatatttcgttgcaggtacatgtaatgtcacgatatcagcaccttcaaccgcttcctcaatcgtatctttgtaatcgacatacgttgcaattttagcattaggaaacgggtcgtatgcgaccacatcactttgataaccattggcaaatatatcggctactacacggccaattcgacctgtaccaataacagctacttttaaatctttaatggatttcgataaaatagtaggttcccatctaaaatcatgctcccgcactttcgtttgaatttgattaaaatgacgaaccacattaatagcctggttcacagcaaactccgcaattgaattcggagagtatgacggcacatttgacacaataaagttatacttgtttgctaactccaaatcatatgtatcaaatccagcactacgttgtgcgatttgtttaatacctagttcatttaatcgtttataaacatgctctgataatggtatttgttgtgatagcgataagccatcataaccagcgacaccttcaacattgtcatcagttaatgcttctttagtaatatctacctcaacatgatgtttctctgcccacgccttgatataaggcatatcttcatcacgtacactcatgattttaatttttgtcattttaacatcacccttaactttattattcatataaatatgctagttctgttaatcttattgcagcttcgtctaatttctggtcatctaacgccaatgaaattctcacataacgattaccattctctccaaatggtttccctggagcaacaagtattgacttctcttgcactaaaaattgctcaaattgctcgctgtcataaccaggcggtgtttccaaccatacatatatgccacctttagcatgaacaaatggcaaatcagcttttgcaagcatggcttcgaatcggtcacgacgtgttttaaatacattgctttgttcttctaaaaaatcatcataatgattcaaagcatatattgcggcatcttgtaatgcaccaaacatcccagcatttgtgtgcgtttggtactttttcaaagcttgaatcatatctttattaccaactgcaaaaccgactctaaaacctgacatgttataacctttagacaaggaataaatttcaatcgcaacatctttcccattttccgaagcaagtatactaggatttttagcgtcgaaaccgaaagcaccataagcaaaatcatgcacgattttagtgtctgtacctttaaatttagctatcgcttcatcaaaaacttctttcgtagctgtcgatccagttggattatttggatacgttaaataaatgagttttgttttatctattatttgtgaatcaactttggaccaatctggcaaataatgtggcggttctaaattaagcgggactggcttgccatcagctaaaagtacacctgctaaataatccgtgtagcctggatcaggtagtaatacatagtctcctggattgataacacatgttggtactgccactaatccattttttgtaccatataaaatgcatacttcatcttctttatctaacgtcacattatattgtctttgataaaaatctacaatagcttgcttgaacgcttctttaccatgaaaagcaccatatttttgattttcaggaatagttagtgctttttgaaaatgatcaataataccttgtggcgtgggcccatcagggattccaactgccatattaattaatggcaatggtccatgttcgattttacgtcccatcgttttcccgaaataactatcagggatatttgctaatttgttagagatcatcaaattcctcctctatcattaaacatagcctgggcgactatcataatcctaacaacttgtatcactctcatttagatggttacaatgacatcgccattcaccgttatgttcaacagaacttatgacacacgttgtattgaatgaatttattttcattttaggtaggtataatattattgtcaatattaggaattttcagattaatatgcactcaatcgttatgatttaactgtcatgcatatccgcatgcgcaaccagttagatatgcttatataaagtataacgcccatcaaggtacgtattcaaacgtgaaccttaacaggcgtcattcattgttaaataaaacttcttaagcacatacttatttcactatgccttttacgttccccttatacttttctcacatctttctcttagactactcccttatacgccccgctcaatatctttaatcatttcatctacagttattttcgcactcgttaagacaataggaacgcctgcacctggatgcgtacttgcacctgcaaaatataaatctttataatctcgcgatacattttgtggacgataataattactttgcgctaaagttggcattaaaccgaatgccgaaccaaatttcgcatgatacgtttgctcaaaatcatttggcgtaaagattgtttctgaaacaatatgcgattttatatcttcaaatacttcaatcgttgctaatttacgataaataatttcctttatttgttgcgtcaaagcttcatctgaccaatcgattccgctacctgttttaagttccggcgtcggcattagcacataaataccagttttgccttctggcgcaagtgatttatcagcgaccgctggtacatacacataaatagaaggatcatatgataaacgtccctcaaatatttcttcaatattgcctctaaagtcatctgaaaaaataacattatgaagtctcacttgatctgtcacatcaatatctataccgatatacattaaaaatgctgaacaagagtaatctaagtctgcaattttatgtggtggatactttttaataggtgcaaaatctggcattaatgattccgcaacactagggaaatcagccgtacataaaattttatcaaattttcttatgtcaccattcacttttatcgcatcggcccgtttgaatttaggatcaataataatttgctcaatttcagcatttagttcaatattaacgcctaagtctttatttaattgcgctagcccttgagccatgccatacataccgcctttaataaaatgcacaccaaacatcatttcaatcataggaataattgaatatagtgacgggcctcgttttggatcaattcctatgtataacgtttgaaacgctaaaagcttttgtatcttttcgttatcaatataatgttcaattagctgatctgcatgatttaacgtttttaacttagcaccttgcacaagtgacgtcatattataaaagtcactcggtttgcgatacgttctttctaagaaatagcgacgtgcaatttcatattttttataaacatccgttaaaaaggacataaaaccatgcgttgaaccaggttctatactttctagcatttgctgtaattcagctaaatctgtaggcaccgttatacgatcatcgtggtcaaaatacacatcgtaaatataacgtaattgtctcaattcaatataatcttcataatttttaccacacgctgtaaaaacatctttataaacatctggcatcatgacaattgtgggacccatatcaaatgtaaagccgtctttctttaattgattcatacgcccgcctacattattatttttttcaaatatcgtcacttcatgaccttgagaagcaatacgggctgccgctgctaatcctgtgacacctgcaccaattactgcaatcttcattattcaaccacctatattctatgatatttactatttatttcatgaaacaactttgcctttttcctcttatccacaaaaacacgttcatgtaatgtatagttagcctgtctcacttcgtccagtatttcaatatatatacgtgctgctaattctatgattggttgtgcttcaatactaaatactttgatttgatccataacatcttgaaaatctttttctgcgatagctgcataatattcccataagtcaatataatgattattaacaccattttggtacacttcagcaatatcaacttcatattgctttaatcgttgcttactaaaatatatccgttcattgtcaaaatcttcaccgacatctcttaatatattaatcaattgcaacgattcaccaagtcttcttgcgacatcgtatgtctgatgtgtttcatgatcacttaaaatcggcgtcaatacttcacctactgtaccagcaacaccataacaatatccgaataattcagcgtccgtttcaaacattgtaaaatgttgatctttatatacagtatcaatgagattataaaaagattgaaaggcgatatttttatgttgtgcaacatgctgaagcgccatcatgattctacgatcactttgaaagtgatgatgttcatatgggtatttttcaatagattgtatatcttcttttatttgatttaaaaattgaatatcgccataaacatctatactgtcatcaattttacgacacacagcataaattgcccaaaccgcttttctttgatcttctggtaacaagtcaaaagcgtaagaaaagctttttgaatgtttcttcatgattttatgacaatatttaaaattcatatccatcattgtcatactagtcctcctatattgaaatgccattaccttgatttattgttctttagatatagaatattgacgacctttccattcaactacaccataacgatgcgtttgtttccaagattggatgaaaattttagtaaaaaacataaataacaatggatgacataccattaataaattagaaaattggccgacccttcgatgcagataaataaattgtgtagtatagctcaagtaaagtgctaccatttttcttacagacatttggcgatattttaaactaagacatagccctaaaatactcgctatagaaccaaacaaccacaacacaattgctgtcatgatcttaggctttgtgccacctgccccagttgacaaatgctttgtccatccttcttgtaatgactgaaatccttcttgatacatgcgaaatgcaacaaatggaaacccttcataaactgttacgggcaatgattgtgaagtatatgcacttcctaaagcaaatccttcaataatatgacggtttgcacttttatgacctccagttgcataataatcttctttatttgttaatgtcaccggtccaaatgcatgctggttagtccgaccgtcgtctaaggtagaaaatacattcataccaacgactgtcattaaattaaatatcgctgaaaacccttcgtagaaacgctttgttatatgataaggctgtacgcttaacaatcctttttcaccttgtaattgatactgattaatcaacgtttcaacagcatctttccttaagaaagttacatcagcatctacaaaggcaatgcgattcgtacatgcatgcgtcacaccttgataacaagcatgtgatttcccataccatttgccgtcagtatcatcaacaacatctactacagtcgcaccatatgaacgtgctacacgtgctgtttcatctgtcgatccgtcattcataacaatgacatctactggaacttgctgttgtattatcgaatgtagtaaatgacctattcttttttcttcgtttctagccggaataataattgttaatgctttatgattgaagttcagcgttttcgcctttagctgatgtctacgattaaatatcaatgcaccacacgccatagacatggtcactattactgttaatattcgtgataaccatttcatagatatcacttcctattcttcgcttctcgcgcgtttattttgtctgcgacttgttgcccacttaatgtaaccattggcatgccaccaccaggatttactgatccacctacaaagtacaagttttcaaaatactgactttctttaggaaatttaaatcctttgtttttctttttatctgctacaacaccatatattgcaccacgattagaacgataatttttttcaatatcctccggtgtccaaacatcttcataaataatgtgttttcttaaatcagtaagtcccattttttctaatttatccaaaattttatccctaaacttcgcataatcttcagtggtaaaaggctgatcttgaatatatggaatatgtggtaagactttgatattttcataacctactggcgcttgtgtgtgatcagttttattcgtatttactagataaatggtcggatcatctggcaataccttttcatgaaaaacttgttgataattgagataagcattttccgtaaaaaagaaattatgatgtgctaattgcgggtattggcaagcaacacctaaatgcatcacatatcctgagcttgccggctcaaattccctctctaatttgtttaatcgttgagtatcaaggtgaattaaatatttataagtaggtatgacttccatatttgaaataatataatctgcctttacaaactcacctgtatctaatctgacacccgtcacacgtctttgatatgttttaatattgtccacacgtgcacctgtatgaattgtgacaccttcttcacgcgctagcttttccaaggcattggctaaatgatggattccaccttctacataccaaaggccttgctcttgttgcatatggaataacatagataatacagctggcgcatcgtatgatgaagaacctacatatttgataaaatagcctaacatttgtcgcaagtatggattcgagatacgcttgtctatggcctgttgcatagtatgtacataatcataattaataagagcatttaatggcccatgaaatttaataatttgagatagtgtatctaaaccatagttgaaataccctttttcagtaatacgatcgattcgtcttgtataattcaaataattttgcagttcctctatatcctgtttcgacaatatcgcattatgctgacctgtttctttaataccttcatacaaatcgatagtcgttccatctggaaaaaagctacgccattgatgtggcaatcgcttgattgtaacgtagtctgacatttgcttcttgctatattcgaataatttttcaaaaatataaggcatcgttaaaatagatggacctaaatcaaagccaaagccatctgattcatgacgattcactttgcctcctatatgattattttgttcatataatgagaccgaatagccactttgtgccattcgaattgctgcagaaatcccacctaagccaccaccaataacgatgatatgtttagtcatgacgttcacctcttcgttttaatatgcgtagtaactgcgttaatctcggtcgattatagcgttgcacaataatgattggaacattagctatcattgcatagaaaatatttatatactttactaaacgagggcctttattgaatatgatgactggaagtatcgatatccaatgaatcaactctgccctctttgtctctataatcattttttcaatttcatcagtattgattgtcattaaatgacgctgatcatatatattttgattaagctgatgaccatctaaaatcttatgtttccattttcttacgtaaaaccatttgttccaaaattttccatgcttctcaaagttaaatgatttaaatattatgtacttctgacgaaaatacttatcaggaattcttgtacctaaatttgctatatttagttgaacaattaaccaatacatactacaaaaaaatgctgttttaatatattttttcatggttttcatctaaattgaatcactctcaatcatactgacatagtataaattatcactttattacttagttccctaaagatcagtgaataaaccgctctcatttatatttatataaaacaaaaacgccaatactctcatgttagagaatattgacgtcatttgatttacatttgattaatgaatgaaattatatgaacctgcttggtttgctgaaattgtacgagacgtaaccacaccagcaccatgtccatagttcatttctgaaacacgaacagaaccgttgctgttaacgccttcaacgtaagcaacatgaccgtaatagccttgtgttgtttgcatgatagcaccaacttttggtgtattgttcactgtatagccagatgatgcagctgcgttagcccaattacttgcgttaccccatgttgaaccaattttcccaccaacacgatcaaatacataataagtacattgtcctgaagtatataagttacttcctgatgcataaccattagaaattgaacgaccatttgaagatggcgctgcagttgtagtcacatgaacattattacttgttgtgctataacttgcacctgaaccaccagtataatagttatttgttgctgtttgactattgtttgtatagttattgtattgatatgaatgattatagtagttattgtaagatgcattgttataactataagtattgtagttgttgtagtagtatgtgttgttttgcgttaattgacttggattccaatttcctgtccaagtgtaatgataattaccttgtgcatcaattgtatacgtatagctgtatgattgagcgtcattagaattatatccattgttattttgttctgcggcttgtgcatcatgtcctgcaaatgcgatagtggcaagtcctgctgtagcgattgtagctgtaacgatttttttcataattaaatatcctcccaataatcaaaacactctatacatatagtcattagcgactcaattattttaaattttatattttttatttttttagtatgcaaacaattataacttttatagttttgcgacaaaacaaactataacagagattaggtgtcttgcgggctttgttatcataatgtaatctgttcctaataaagcttcattgaatgtaatataccaattagaatgtttacaacactttttctgcaccgttactatgggatttgaaaataaaaaagcactaaacttttaatgaaatacatcatttttgataataaatatcagaagtaatgtaatatttcaaaagtttagtgcatcaaattatttcttatttgtagcatgtgtttccatcgtttttacaatcaaatcagtcagcgctttactacctgcatattctaagtgaataccgtcatatgcaaagtattccggatgacctgcagaagctttataccaatcgactagatgtacattagagcgcttttcagctgcctcataaattaatttatttattctaccttcataatctctaggtactctaatagaaactaaatatatgtctgcttttccaaaactatccaatagttcatttaattgatctttcgtaaatgccccatttgtaccaagctctactacaactttttgaccttttttagcatagtctttatattgcgatttcacaattggtgtagcatcaacgagttgccgtccaactttaccatcaatttgtgcatttggtattttcttagtaaagacattaccaatatccaccatgaccgagtcaccaattaatagtggtgatgactttttaatatcctctttgctattcgctgtctgcttatcctcttgcttatcttttttaacgacttttttcttcgttgttttaaattccgtcttcttctctttcttctcggcttcatgttgtttgccaagtgcatcaaactgtccactgagcacaacgatagacggaaccaataataggataactaacactgttctagcaaattgccccttctttttaggtaaaaatgcaaaagctttaaatccttttttacgtataggtgtttcaataaagcgatacgaaatttcagccattaacgctgttaacaaaatttctataatataaacgtataccggtatttgtccttgtacgtaataactgttcacaaaaacaatgataggataatgccataagtataagctatatgatcgtttacctataattagtaaaggtttcatacttaaaaatttagcaaataaactagaaggatgtaccgcaattgcaataatgaataaagttgcaaatgatataatgtaaaatcctccattatagatccattgatcttggtctccaactataaagaacaaagtcattagaaccgcaaaaccagatatccctataatatctaatgatacgacaatctttttagaaatatcttttttcaaagcaaacggaggccaaataaatgctaatatacaaccaagcaataaagtttgcagtcgtgtatctgtcccaaaatacacacgtgaattatctccagtgatgaaatgaatcactatcataagtcctaaagaaatcaacgatacaataaatagcgtttgaataatatttctcggtttaaatctatgtaataagaacgtgataaccaatgggaaaagcaagtaaaattgttcttcaatggctaaagaccataaatgtttgagtggttcaatagcaaattggttaaaataatctacattctgtgaaatgtaccaccagtttgaaacatagaatatagctgcaatagcatctcgtttcatttgtataatcaattccggtttaaatatcagtgtgaacgtaagcacgacacagattaaaaataacactgccggaatgagtcgtttcaatcgtcgcttccaaaactctagcaaatcgattttttgcgtccgataatactcacttatcaacaaacttgttattaaataacctgaaataacgaagaatgtatctactcctaaaaagcccccacttaaccattgtgcattcaagtgataaataatgattcctataactgcgaatgccctcaatccatctaatccaggtaagtatcgcggggaatacattttttctaaacgtttaaagtcttttgtatccatgttaataaacgccccatttatttttctctattttgtagtatatcacaatatttttgaaaataaaatattgcactgattttcattaattgatttaacccttaattaagatagttttaaattttttattaagtagaaaacaattattacagttgatttcattactgcaaaccacatataaatttgtcgattttactacataacatagattatcatagattcttgaatttttagcaaaataactgttattttcattatatttttacaaaaaaaggttcgttttatattttatgcatcttactgtaacagaatcattaagatatgctattcgaatatactttttcaaaatttatataatgaataaattaacatgtattgaaaaaaaagcgaaatgcagcctatcctctaatgtaaaccaaacgatatatctcgtcagactttatatttaaacgctatgtgtcacttttaaaatgaatattactaagattgtcatatcaattattattgcatcgaattaatcttttaaatttctgtaataaaacctattatctacatctaatttaggaaaactacttggtaaatctcctcgcttaatttcacggaagtcattattagaataaaaatactgtgcactaataaatttatcaattgttcctaaataaataccatcgatattttgttctttacatgtcattataactttatctaaaagttttttacctatttttaaattcctataacctttatcaacaaacatttttttaagtgcagacatattattatctagtctaatcaaacctatagtaccaacaatattttgatgattgtttattgcaagccaaaattgccctccattattcaaatagttatgttcgatgttctccaaatcaggttgatcatctctatcaatttttatattaaattcatttttttgaatcgataaaataaactcgattagctcttccttataagacctattatattcaattatgtttatagccatttttatctcctttttcatttaatttaattataaaatgtgcgtttagtttgtatctagtgtactcagtacagcctcaaatgaagtttcattccacttggcacttaataaagacaagtattttagcagtaatacaataaagtccaataaatttccctaacttcaatatccactttttaaaaaatgtatttttaattaataaaaaaactctccccaatttctatgggaagagctatatatttaatgtctaaacattacttttatttattatgaaggaattagaatccccaagcacctaaaccttgtgctttgtatgctttaacagctgcgttgatttgttggtcaacagtgtttgttggaccccaacctggcatagtttggaataaacctgaagcacctgatgggttgtaagcatttacttgaccatttgattcacgagcgatgattgcagcccatgtagaagctgaaacaccagtacgttgagccatgatttgagctgctgatgaaccagtagcacctgcagtattaccattgcttaatctcactgaacttgaagtagttgaagtgctgtagttatggtaagttggagctgaaacagcttcaacgtttgagttacttgattgtgcattgtagcttactgattgtacatttgaaccttggttgtatgaagtagtgtagtctgcacctgcaacgtttgagaaaccagcagtttgaccattagctgcttcatagctccatgaccatgtagtaccatttgaagtgaagttatattggaaaccatcttttacaaagtggatgtcatatgcaccatctttgattggagctgcatttaattgatcttggtgattatgcgctaagtcaactaagtgtgcttgatcaacgtttacttcagcagcgtgtgcttgatgtcctgtacctgctgcgtaacctgttacacctaatgccactgctaatgatgatgccataattgtctttttcatagtaaaaaatcctccagtaataattgtaagtttatgtttttagtaattatattttgaatttgaatgtcgtagtgcaagtttaaattgtcttttatttctttcaacggtactcactatatcacaaaaaaccagccagtaaattacactttctttacaaaacattacaatatcaagtgttatttgtaatgttgaaatatggctgttttatactgtaatgtgaaatatgtgccctttagaatccaatcaacccttgaaatagtctttaacacataagatttttactatatttagctcaactattacagctttcgtaatattacagattgtatttttgttacatagctgtaatatatctgacatgtaacttctcttattttcgtacattaaacgcaattaaaaagcaatcaacaaatatgtttctacacatgtattgattgctattattgttgtatattcaaagttttaaaacacacatcttttgtgaattgtcttatcttttattagcgcaaataaactgcagctcaattatattgttcaacttcattctcgcaattcacaataacattaaataatttttggtctcatattttcaaaaaacatactgttattatcccatgaatttaaaaatatcattagtatataaacgaaacactttacgataaatgatatctgcaagccaagctgttacaaatggtacaacaaagaacgctactacaattagtaagacactcaaccaagcagaatcaacctccataaatttaaatgcattaatcggtcctaccattcctataaaaccaaatccagctgactctttcgttccatgaatacctactaatgctgataccaaacctgatacaatggctgtcgttaatattggtaacataagaattggatatttcaccatattaggtatcatcattttaacgcctccaaagaagacggataacggcacccctaaacgattcactttacttgtaccaattatcaatactgcttcagtcgcggagataccaattgacgctgatccagctgctaaacctgtaatacctatcgcaaaggcaatggccacagttgatagtggcgaaataataataagactaaataccattgaaatcaaaatactcatgacaatcggttgtaattctgtaaaaccattaaccatattaccgatggctgttgtaatcattttcgtatacggcaatattaaaacaccaattgcacctgaaataccgccaacaactgttgggaatacaatcaatgccatactacctacgcgatgttgaataagtaaaatgaataacactgcaatcgctgctgtaatcattgtattaattaaatcaccaatacccgtaatcatccaagcaccatttttaaactgcgctgcaccgcttcctacatatgctgcacttgccacaacagcaattgctaatggcgataggtcaaatttcatggcaaccaatgcaccaatcaaagcaggtactgtaaattgaattgcaacgacaacgcctaataacgttttaaaaatcggatgataatccataaagtatttaaaaatttctccaagtatcgcattaggaactaaacccgcaacaatacctatggcgacacctgataaaactctaaatataaaatctttgggtgtaattgttttaattgatgtcataatatcatccttccatttatgtatatacatctgtatgcaaataataaagagccttaagttataagctgccactagcttaaattctaagatgtgcatgccgatgttgttatatttaggctagcagtatcatctataactcaagactatgaaaaatagtatatcacaaaattctgaatttttagataaataaattggcaatttttcaaacatattgttacaatacacttttattttatcttcatttttaaaatccattaatacaatagaagaaagacattcaaatgcttaccaaaaaggtacattatttgttaggagcgtatcagcacttacatatcatcaacacaattgacaatataatagaagatactgataataagtgttaaaacaacagatgttaggtagtgaacaaatgatggaaagtaaatccatagatccaagaatcgttagaaccaaacaattgcttgtcgatgcttttcttaaaatttctagagaaaagaaattatctcaaattacagttaaagatatcactgatattgctacgctaaatcgtgcaacattttacgctcatttcgctgataaagaagacctcctagactacacattatctgtaaccattttaaaagacttgaatgataatttgagcatttctaatgtcattaatgaaaaggttctgcgtaatattttcatttcaattgcgagttatatcaaagatgctgcaaagtcttgcgaattaaatagtgaagcattttgcaacaaagcacatcaacgtattaataatgaattagaagatatttttgcgattatgttagaaaacagctatccggagcatcaacgagatatcattgtaaatagtgcgagttttttagcagctggtatctcaggcttagcattacattggtttaacacgagtcaagagacagccgatgtgtttatcgatcgcaaccttccatttttaattcatcatatagcacatttttaataaaacttggtatttagtcatgcatcttgaaatcactatgtgacttaggttcatacttgtacacacaataaaatttaacgtattacgattgattagccgtgtctaggacataaatcaacgtcctatactctacaatgtcatattagcagtcgttaactgaatgaaaataagcttgtcattaaaacatatagattttagtgacaagcatttttgtttttgcgtacttaaacaacacttcaggcaatatgttgtttaggcaacaaatgatatgtgcgtgtttattggcaaacgtacgacatagtagtatagtatgtctaaacaacatatgttgcatagttgatatgcgttgtttaaatactaagataggagggattgacgtgagcgagacagatgaacctcaggggtttgaacgcacgcataatatattaaatattaatcagagtagtctgggtgtagtgacatacattacaaataaattaaagtcgacgttgaagcaacacataataattgctcgtggtaaaaagcgaatcgactatcgactgtcgtataacttttacactacgtattatgataatgtagaaatcaagaaaatcgactgtgaatatacctatgctatgcccattgcaattttaataagacacacgatgtcattcgacaatgctcatttctttgctcagttacgtcatcctgtcttataaaacaacattgcagacatgtatatcaaacgacacttcaataacatcactttgccatcgtactactagtaaaatcgtgtctcaaatcccttattttaattccaaaaatctgctggtcaaaagaccgagaaactaaaaacattacttaatgtgttgataaattaccatataaaaataatctcaaaatatatcaacacttgattctaaggaggatatgacaatatgaaaattttagatagaattaatgaacttgcaaataaagaaaaagtacaaccacttactgtagctgaaaaacaagaacaacatgcattgcgtcaagactacttaagcatgatccgaggacaagtattaacaacattttccacaataaaagtggttgatccaatcggtcaggatgtcacaccagataaagtttatgatcttcgccaacaatacggttatattcaaaattaatatttgctcacgaggtattgcacttaaggtgccaactgacctcataaacaaagcccatactgattgaagacactaatgtgtcgcaccatggtgcacattacgcttcatctctgtatgggctttttatttattcttttgagaatttcattttagcagaccaaaaaattaaaatggtgtccatcaagatctttgaacattgctccataaaacccttggcttactgttggttcttgaacgactgtgccacccgcttctttcactttattcaccaactggtcaacttcttcatttgtgttcacacctagagaaatcatcacttcatttggttcagtattaaggctttgctgacttacattttgaaaatgcttgttttctattaaaattacggttgtttgacctatttgaatgccgaccattttatctaacatttgtgggtttctatttattttaaatcctaacgctttataaaactgtgcgctcttttctaaatcttgcacatgcaaattaaaccacattgattgaatcatgattgcaccccattcattacttattatagttttggactttaagccaatcacttaatgataatcttgttggatttatttcagccattaattcaaagtctacttcataacctttttcttccaaccattgcttttctgcaacaccactaacaaattctccttctataacagtagatttacctgtcacttcactaaaaattgttgctgcttcacttaatgtaacttcatcggaaccaatctctattgattgatgcgtaaagctttgtggatgtgcaaaaatatacgatgcaattttagctatatcaatagaagaaatcattgtgaattttatattcggattaataaattctggtaatgtaatacgttcatcttcgactttagcaatgcgtaaaaaattatccataaagaatgatggtttgataactgttgcatttatattagattccattaatctattttctatttttgctagtacttcaaagtgtgggccagttcgatttcgattaacccctcccgcagtactatacacaatatgttgaatattttcttgctcagctatttcaattatcttcataccttgtcttaattcttcgctaacatcatctttaacgattggctgaatactgtataagccatacttacctttcatcgctgattgcaaactaacattatcactcagatcaccttcaacgattgataaatgcggatgtcctatgtctgaaagtttacgattattcttatttctagttaatgcacttacataccatccatcctctaacaactgttttacaactgcattaccttgcttccctgttgcgcctattactaaaatatctttcattttagatccactcctctttttatcttaaaaaccaatagtcctctttttcaccttttaaatacgtatatggttctggtgtttgtccatttcctttaatattgtcgtttattacatctctgacatcccatactaaatgaataaatcgttgtaattgatgactaaaaatgcctagtggcgctgtcatagctaatactttttccacatcttctgtagtgacattcagtttttcagcaatcatttgaaccgataaggtagatgcttcgaaatgtgcttgcaactcttcagctgtgatgcgtctttgctctttatttaaagacattatcaacactcttttcttttatgatatttaatagttattgcaaattcattgctaactttcttaacacgttttataataaacggagagttatccgtttgtcaattttagagaattttaagtaggtgtaatcatgcgaaaagatgcaaaagagaataggcaacgaattgaagaaatagcgcacaaactttttgatgaagaaggcgttgaaaacattagtatgaatcgtattgctaaagaactaggtatcggtatggggacattgtatcgacatttcaaagataaaagcgatttatgctactacgtcatacaaagagaccttgatatttttatcactcattttaagcaaattaaagatgactatcattctaattatgaggttatgcaagtgtcgttagattatcttttacaatttaaaatcgataataaggcactactgcaatgtattgaagcaggcaacaataaattacgtttttaccaaagcgcattttatcaagaattatttgatttttattatgacttatttaaaagcgatgacgacacttacacgaagttcaaaacagatatgctgttgcaatcattatcaactagtgtatttgccttccaaatagagcatcgccatatttcaattgaagcgtacagaaattatttattaaacatttatttagatgaggtgggacgtaatgactaaaattgtgttaatcacaggaggcaataaagggttaggctatgcaagtgcagaggcacttaaagcattgggttacaaagtttatataggttctcggaatgatgtaagaggacaacaagcatcacaaaaattaggtgttcattatgtacaattagatgttacaagtgactactcagtcaaaaatgcttataacatgattgctgaaaaagaaggccgtcttgatatcctcattaacaatgcaggtatatctggtcaattttcagcaccttccaaattgacacctcgtgacgttgaagaagtatatcaaacgaatgtattcggtatcgtacgaatgatgaatacattcgtccctctcttagaaaaatctgaacaacctgttgtcgtcaacgtatcaagtggtttaggttcatttggaatggttacaaaccccgaaacagctgaatctaaagtgaattcattagcttattgttcgtctaaatcggcagtaacaatgctaacgctacaatacgctaaaggattacctaacatgcaaatcaatgctgctgatccaggcgctacaaatactgatttagttggtgattttagtaataattccaaacacgtttctgaaggaatcaagccaatcattcaattagcaacgattggtgcagatggcccaacaggtacatttattaatggcgatggagagatgccttggtagatcaattttatgttacaaacattgaaattagaggtatataaaaaatgcttctgcaatagatgcaataaacatgcaatacaatatggaggcgaagtaaatgaaaagtattacgtttgaagaacattatgtcattgaagatattcaaaaagaaacgatgaatgcgatatcagcagatcctaaaggtgtaccgatgaaagtaatgttagaaggccttgaaaaaaagacaggttttacaaatgccgacgaattatcacatcatgatgaacgtatccaatttatgaataatcaagacgttcaaattcaagtcttatcttatggaaatggttctccttcaaatttggttggtcagaaagccattgaattatgtcaaaaagcaaatgatcaattggcaaactatattgcacaatatcccaatcgctttgtaggctttgcaactttacctatcaatgagcctgaagccgcagcgcgagaattcgaacgttgcatcaatgatttaggattcaaaggtgcgctcattatgggacgtgcacaagatggttttcttgatcaagacaaatatgacattattttcaaaacagctgaaaatttagacgtaccgatttatctacatcccgcgccagttaacagtgacatttatcaatcatactataaaggaaattatcctgaagtaactgcggcaacatttgcttgttttggttatggttggcacattgatgtcggcattcatacaatacatctagtattatctggtatttttgatcgttatccaaagttaaatatgattattggacattggggtgagtttatcccattcttcttagaacgtatggatgaagctttattcgctgaacatttgaaccaccctgtaagctattactttaaaaataatttttatatcacaccgagtggcatgttaacgaagccacagtttgatttagtcaagaaagaagtaggtattgatagaattctttatgctgctgattatccatatattgagcctgaaaaattaggtgtatttttagatgaactgggtttaacagatgaagaaaaagagaaaataagttatacaaatggtgctaaattattaggtttatcacctaacaattaacaaatggaggtcattgaatatggaaactttagaattacaaggcgctaaattacgataccaccaagtcggacaaggacccgtgctcatctttattcctggtgcaaacggtaccggagacatttttctgcctcttgcagaacagttaaaagaccattttactgttgtagccgttgatcgtcgtgattatggagaaagcgagttaactgaaccactccctgattccgcttcaaaccctgacagtgattatcgtgtcaaacgcgacgcacaggacattgccgaacttgcaaagtcattaagtgatgaacctgtctatatattaggttcaagttcaggttcaatcgttgcgatgcatgtgttaaaagattaccctgaagtcgttaaaaagattgcatttcacgaaccaccaattaatacatttttaccagacagtacttattggaaagataaaaatgatgacattgtgcatcaaattttaacagaaggcttagaaaaaggcatgaaaacatttggcgaaacattaaatatcgcaccaattgatgcaaaaatgatgtctcaacctgctgatactgaagaaggacgtatagaacagtacaaacgtacgatgttctggtcagaatttgaaattagacaatatacgcattcagatattactttggatgatttcacaaaatacagcgataaaatcaccctactaaatgggacagattctagaggctccttcccacaagatgttaacttttatataaataaagaaactggcatacctattgtagatattccaggcggtcacttaggttatattcaaaaacctgaaggctttgctgatgtattattaaatatgtggggttaattgattgttctctaataaaacagcttggacagttttcaaattatatttgatggctgaccaagcttatttttatttacgcttaaacgttcaaatcaactcgttattatacatgaaggcatgttaaccattctcttccactgaaaacactactgttccaaacattgatagtcttcttttgaaataccctttccgataagcaccaaatattctggcactttttttgaaaatgctacaggtgttaattcatattgtccttgtgtaaattgaatgagatacgtatgtgcggtgtcttcaaatgtcataaaccctttcaacctataaatatgagacggaaggcatgctaaacgttttataaactctgctttagtacatttgactggtgattgcacaaattgatgattaatcatttgatgtaaagacttatgtttattgtcagaagttgctgtcatttgtctaactgatattggcaaagtgacgctgccatgcataccgacttgtatatcggcctctgggttaataacttctaaatctttcaatagtttgctcgttgtttcaacatctgctgaatctattttattaacaaataagacagaacaatatgctaattgctcataaaataagccttggatgtctttagggaatgatttaatgtgtttatacatgcttgcgtctattacaccaatcatatgtgtaattgttgtaaacggagctaaaataggcgttaaacaagcatctaagacagagaccggttctgcaatcccactacattcaataaatacaatgtctggttgctcttttaaatataattgatgtaactgttctgatacatctgctttcattgcacaacagatacacccctctgtcagttcacttaaaggtatgtcttcagatactaaggcaccatcaacactcattttcccaaattcattcatgatgactgctggtttcagcgattcctttaatgattcagcgagcaaatgatttaagacagtcgttttaccgccacctaaaaacccacctataataactattttcatctgcgactctcctcttatacttcatatgaatagcatattccaagatagatctcctattgactgacatgactctatattcagttatagttcattttttttaaataatcagcattactattttaacaatgatgcctacaccaataactaaagacaatgatgtcaccatttgctttccaattaattttagtgctgactgaccacctaaatgtttcaaaagcatcgtcattgtgaccgagcacgctgtaaatgttgaactaaaaaacacaagtagtagtaactgtgttgctgtcattccttgtaataaggcgccctgatgcaaattaaacaagagcatgccgtcttttcgaatcattgaaaataaaatccctggtgacaattctgacgagatgcctaataacgataatataggtgtaaatatttgtgataaaacattcaaaattggcgttagtgataaaatactaacaataagacagattgtgataaaaataggtagcgcttgaacgataaacatttgtatattttgccacatttgtagcaacatttgacgtatatttggcatatgtaattgcctatcataaggtagcggaacgctaagttgttgatcattctttttcaaccatatcctttatgtaagatgccacctaaaagtactaatattaagtacggcataaatagccatgactttccagctacactaaaaatagataatgtcgcacctatttgataactacaagaactaccaaagcttattaaactcatacactgtgtcttcgtgcaggtatggcattggtgtgctgcttgtgaaatagctgctgcattacatccaaacccttctaatagtggcacgatatcattaccttgtaatcctatccataacattgacggttcaattgcccatatcatccatgatttgagtcctgtttgatcaattatagcagttgataaactaatcaatattacaaccggcaatgcccatacgagcgaatatgttccaagtgatagcacaccataatcaccaaataatatatgctgtaatatatcgtgattgagcaatgttgtttgagttaaatattctatccatgctgacacatactgattttgaaaccaatctgaaaattgataagcgataccgattggcaatgcaaacattaaaaatatcaacaaccaggctaaaaatgtcgcacttattttaggtcttaaatgtcgtcgctcatgttgaaatagtgtcaattgttctatcacatgttcactcgctataggcgaagaaactacactttctgccaatgaaatatctaatttctgttttatgattaataatcttaatttcgctttttctgttgcggtaagtttatccgcatgactaataaccaaataatgaggttcattaggtatgggcgtataatgcccagttctcatatcatatttcacttctaacatgtgcatgacacttcacaacatgaataatcatctaaatacatttgatttttttgataattttcaatgacatcttgtttagctggtaagccttcccgctgtgttaaaagatgtgcaagtactgcaaatcgcgctctaaatttatagatatagcataatttggcattatcattttcaactgttgcaccaatcataaaaatattcggataacgtgtcgattcatcatgtgttgttaatttaatatcttgatttgttgtcacaaataattgttgaacgattggattttttgttgcatcaaagccagttgctagtattggttcatgaggtgtaagcacactttgtccgctatcaaaactgatatgatactgtccattgttaaaatcaatatctttaactgtataatgtacattcatttcgatgcgagcaccttgcttaatgacattacctagtcgctgacgtgtataaggtgacaatctaacactaggatcagcatccggatcatttaaaccggttgtgctagtataaagtgcgatgtcagagccattttttgcaagttgatatgcagcatcaaagccactttcattacctccgataaccacatattgccccttattaaagttatcaaagtcttcaatttcactataatgaataccatatttaaatggctttttagggaaattataatcacctgttgcgacaaagatataatccgcgtgatatatctctgttgtcgttgcaatcgtataatatgcatcatctacagatatatttgtgacaactgtattttcaaagatattcagctcgtaatggttggcaaccacttgtaaatattcagcatatgtttctccggaaatatgttcttcattaaatgtaaatgctggtgaagtatccatggaaattgcattcatatcaggcatgccaaatccattagacgtaaatgatggcgtgatcgtacgggtcgatttcggccaatgtttaaatgaatgtcctactgttcctttttctaaaataatgacatctgttataccgaaatcttttaaggtaatggccatacctatacctgcagcaccggcaccgataatagccactttatgatgttgcatattaacactccctcaatgatctatttcaagttattgtttttgattataaatcgtaataattacgatttataaagtatagacctatccttgagaaatttcaatattaaaagaaaaacttccgttattgtagagaattcatctacatttcggaagttggtatgtgtctttttttaaaatttaaggctgctacgtttagttcaaatgattatgaatgacatttcatggtatcatccagcctcagtacttggagataacattttggcggtgagacagaaatcatatttttacaaaatttatttcgtcgtcccaccccaataaagaaaaagtatttctttattgttgtgtaacttctccacgttgtatttcactatccaaattttgtttcatattttcaaacaactcttgaaatctaacctcatcttgatcagaataacctttaaaaataactgaatctatattttcctcgttaaaataataaatttcatcttctacaacaccaatcggatatttacatgcagaatagtcaaacatatacttttgattttcaatttctacaattggtcctctattaataatcattaacttttgcgaaccttcttttaaataaataatgcttcctattgtttccatttattttcctcctttgtcaccgtctcaatttcaacattccttcgcatttccaagtcaatcatctcttcttccactttacgaatgccatgttgaatttgctgttgctgctcgtataacgcttccgttgaacgtcgtttcgcaaaatgaaattcatcgcggaactgttccatacgactagccatattgctactataataacgctcacctaaatgttgatataattgatctatcgaatgattaagcgcatcactttcatctatcaatgctttaacctctcgcttttcatcatataagtcatccatttgctcatgtttcgctgtgattattttattgatttcatccagtttattcgacatcatttcaccacgttttaatttttaccaatttcattaccaatcattacgtcagtttggtcaaaagcctcaccaactttttgtatattatcgctcgcagttcgtattgcttcagcaacagattgattcttactcatcaaatcatctatcacactatgagcattattatttccacttactgttgtactttcatctttatccggtttcgacacattattacatgtttcaacagcgcttttaatagatgatgatgcactattggtcttaaaaatatcactttgaactgtactcatcatttacacctctctccatttaaattattttaaaattattagaaactgtatcaatatatgatattcaaacattcaattatacttaaatattgttttatgattatattcaaaattattgtatcaataaatatgtatcattcctagaattttattgaacaaaaagttataaaatcacttttattgtaactcaaccttgttttacattacagaaattaacaatagcgattaaaattttattttccaacaataaaaacgcacaaatatttttattgaggcagctgtatcgcttctcattgtaaaaatatctgtgcatattatctatttatctcaatctaacgtcttaactaacttgttgtatcttgtaaaatcttatccatagaatgcgcaacactatcacggtacatctcaccaaatttcaataaatggaccatcaataaatataaacgataaaattcaagtctataggatgcaccttttgcgagtggataatgtttattatacgcatcataaaattcgctcgtaaaaccaccaaataccgttgtaataccgatatcgaattctctgtcaccatataatggcgctggatcaaataacgccggacgaccatcttgtaagaacatataattaccaccccataggtcaccatgtaataaagacggtttactttgatgcttttctaattccgccacaatttgacgtcgcactttgtcatatactttgatatcgttggcatcccatagccctctatttagcaactcatctttcaaatggtccaagcgtttgtcgacaaaaatggtacaccaatcgtcttgccaatgattatcaaaagaaatatcgccaccttcataaggtaatgagaagccaaatttgccttcttcttgttgctgactgtgtaattgagctacgagttgccctaattggcgttgactccctgaagccccttcttctaaatacgtcatcactaaatacgcatcaccgttaacctcgccacttgcaattactctaggtgccgtgatacctgcacgttcaaattcatttaaacctgcaatttctgcagcataaaatgattctttacgtccacgttggacaagtaagaaaaatgtatccgtatctgtttcgactcgatatgcttcgtttacatcaccaccactcactggtgaaatctctttaatatcttttaaaggtaaatgctctaaccattgttcattcatacaaacaccttccaatctacttactttatactataatattgcctaattaggatgatttaatcttaaaaacgttattcaaacttgcgtcaattttcaaaactttttagttttaactaggaaattatgtatggaaatgctagtctattaaaagaatatatttcacatatattaagttgaggatagtaagcctcaaatataatgaaataggagcatactcatgtacaaattaattaaacctttcttattcaaaatcgaacccgaaaaagcacacggactaactatcgatgcattaaaaacgttacaaaagtttccggttttattcccagtcgtcgataaactatttacttataagaatccaacgttatcacaaacgatacaaggtaatacgtacgacaatccaattggcttagcagctggtttcgacaaatcttgcgaagtaccaaaagcattggaacaccttggattcggtgctttagaattaggtggtatcacacctaaacctcaaccgggtaaccctcaaccacgcatgtttagattattagaagatgacgccttgataaatcgaatgggcttcaataatattggtatgaacaaagcactaagtcatttgcgtaaaaatgcttatcaagtacctgttggtatcaatgttggtgtgaataaaatgacaccttatgaagcgcgttatcaagattatataaaggttattgatacgtttaaacacgacgtttcatttttcacagtcaacatcagttctccaaatactgaaaatcttcaaaacttccatgataaagatgaattttcaatgttatgccaagctttaacagcatttaaaaaacaacatgatgtaacagtgccaatttatttaaaactaacgtctgatatggatttcgatggcttaaaagcactattaccagcgattactgagacatttgacggtatcatcttagcaaacacaacgcgacaacgagatggtttaacttctgctaataaagtcgaagaaggcggtttgagtggtcgtccattatttgaacgtaatttaaaattgattaagtatgcttatcagcaaacaaatggtgaatttttaattataggtacaggcggcgtattcagtactgaagatgcaatcaaaatgatgcgtcacggtgcgtcacttattcaaatttattcatcacttgttattgaaggcccaggtttaactaagaaaatgaacaaaggcatcgcacgttacttaaaagatcatcattttgacaatgtcagtgatattataggactagatgcctaatccaacatagtcaaataatactttaaaacttgctgaatcgtcttattaaaattatgatataactcaagaagatatatttatcaccatttttcaaaataatggcttaaatatcacatatcattaaatatagcgttttataacggaggcgtttgttatgactaaagaaacagataataaaaaaacagtagcgacttctgacaacaaagacacacagcaacaaaatcaacctgaagaagatgaacgtcaaggtttgaatggttatcgtaaaacagatcttgatttagaaatcgagcaagagctacgtgaaatgatgaaaacaggagaaaatgaaacgaaaaatgactataaaaagtttaaagtgttttcacttatttcaacacttgtcattgtcattttagcaattataagatttgttcataaaatgatgtaattagagtgagacattgttttatgtctcaggatccagttattcattatatctacaatatttacgattatataaataacccgagattttagtatgattcatttcactaaaatctcgggtttctatttgataatttttaatgggatatggcatgtatacgttcttgccttttatctcatttccaatgattaatctggatattgttctaaaaatgctttcgcttctttattaactgttttaaaatcaataccttgttgcatcgctgcaaagacacatccacaataacactgcctaaagatattatagtcattacacatttctatggaacgctcataacctttacttttcttaaaatcacttggcaaatagttcacatcgtatattttttggacatccataccaagttcattgattaattgtgcgttctttttaggtgataatgtgattgcactgccaaaataatcatagccatgttctacagctgctttcgctacaatatccaaacgcatttcaaaacaagcggtacaacgtaagccgccttctttttcatcagctaattctttatccttcaccattttcacaaacttatgtggttcataaggtgcttcaatatacttcacattcgcaccagtcttgcgattaaaatcttccacaaattgttcttgcactttagcacgtcgtaagtactcatttttcggatgaatatttgaattcgcgaaataaattgcaatgtctgcatattgtgttaaaaactctaatgtatatgtactacaaggtgcacaacaactatgcaataagattttaggtctgattgcttctctttcccactgcccgattaatttcttcaacaccttgtcataattaattttttgatttttcattttactgataataggttcagcattaatcatgatttaacctcccacatttaatcattaacttctattatatatgattcatattaaatgtcagtcaaaaaagttagaaattcattttaatgcatttatatttcgaaaatcccttatgtatctaaaagcattttttaaacttgaattttaaaacactaaacaacacatacgtctctgtgtcattttcattttttgtatgtcatatatatgtttacttcatttaaatcaatttcatcttataatttatcgtgtattttacaaaagattgacttcaattcatcgtaaaagttatacttttgccattttttaatgtaacatggtgttagtaataaaaataatacattgaggtgttttacatgacagcattattcccttatatcgcttttgaaaattcaaaagaagcccttgcatattacgaagaagtatttggtgcaactgacgttaaacgtttagaagttggcgaagaacaagcgtcacattttggtatgactaaggaagaagcgcaagaagcaactatgcatgctgaatttgaagtgcttggcgtaaaagtgttatgttctgattcttttggtcgcgctgacaaaattaataatggcatatcattattaattgattatgatgttaacaataaggaagatgctgataaagttgaagcattctatgagcaaattaaagatcattcttcaattgaaatagaattaccgtttgctgaccaattctggggtggcaaaatgggcgtctttaccgataaatacggtgttcgttggatgttacatggtcaagactatactgcaatccaacaataatgttattgataaagatatcatttaataagcttatgttatttagcaaggcaagccactctcgattcatggcttgccttattttattgtatatttttaattatcgttgctggcccttgattgacaatcgtattaaaatgccttattaagtcaactttgtctatacggtttggatcttctacccaatgtcttataaaagacaatcccgcacctgaaacataactcatgaaataagaaaatggtataccattaatttgatcattttcatttttataacgttgtaaatgacacataattaaatcataaagtttttcgtggatatttgaatctttacccatacgaaacatcaattgataaaatgcgatgtctttttctatcatttctattaaaacggtcataatttgatgtatgttatccgtggataacttaactgctccatttaacttctcatcatgaatgaagtctcttatttcctccaactgctggtcctctaatttttcaagcaaatcatacttatcataataatgcgtataaaatgtactacggttaacatcagctaaatctgcaatttgttgcacagtaatctcttctaattggtgttgatgtaaaagttcaataaatgcatttctcattgcaacttgtgattttctaatacgtcgatctatagtcatttatatcaagtcctccccaatgattataaacgttatgttcattatcccacaaatctccaacattgatgattggcacacaatgtttacctgtttaatataggtgatacaaacaaacagaaaaaggtgataacaatgaaccaacatttactaggaaatccaaaattaactgtaactcatgtcaatgaagttaaagccggtattaaccacatcgttgtcgacagtgttcaatatggaaatcaagaaatgattatggaaaaagatgtcactgtggaaatgcgcgatggcgaaaaattatatattaatattttcagaccaaataaagatggcaaattccctgtagttatgtctgcagatacttacggtaaagataataagcctaaaatcacaaatatgggtgccctttggccaacattaggtaccattccgacatctagttttacacctgaagaatcaccagacccaggattttgggtgccaaatgattatgttgtagttaaagttgcattacgcggtagtgacaaatccaaaggcgtcttatctccatggtcaaaaagagaagcggaagattattacgaagtgattgaatgggcagcaaatcagtcatggagtaatggaaatatcgggacaaatggtgtttcttatcttgcggtgactcaatggtgggtcgcatcattaaatccaccacatttaaaagcaatgattccttgggaaggcttaaatgatatgtatagagaagtagcctttcacggaggtataccagatactggcttttatcgtttctggactcaaggtatttttgcgagatggacagataatccaaatatcgaagatttgattcaagcacaacaagaacatcctctgttcgatgatttttggaaacagcgtcaagtgccattatcacaaattaaaacacctctactaacatgtgctagttggtctacacaaggtttgcacaaccgtggctcttttgaaggatttaaacaagctgcatctgaagaaaaatggctatatgtgcatggacgtaaagagtgggaaagttactacgctagagaaaatctcgaacgccaaaaatcattctttgatttttaccttaaagaagaaaataacgattggaaagatacgcctcatgtcatttatgaagttagagatcaattttataaaggcgaattcaaatcagcgtcagcgttccctttacctaacgcagaatatacaccattgtatttgaatgctgaaaatcacacattgaatcatgcaaagattagtagcgcgcatgtcgcacaatatgactctgaagataaacaacaagatgtaagttttaaatatacgtttgacaaagatactgagttagttggaaacatgaacttaaaactatgggtaagcactaaagactcagatgatatggatttatttgcaggtattaaaaagttagatcgtcgtggtaatgaagttaacttccctgattttaatcatattgaaaatggtcaagtagctactggttggttacgcgtatcacatcgtgaattagatcaagaaaaatcctcaatcgcgcaaccttggcataaacatgaaacagaattaaagttgtcacaagatgagattgtacctgttgaaatcgaattgttaccttcaggcacgctatttaaacaaggcgaaacattggaagttgttgtaaagggtagtgaaattgtaattggtaatagtactcctggcatgaaaacacgttatgaacatgaagaaaccgtaaataaaggcatgcacatgatttatactggtggtaaatatgattcacaattaatcattcctatcgttaattgatatgcagcaattacggtcgcttttgattaaaagtgacatagtgataggactgtataacaagagaaagccacacgcttggaatcttaaaccaaggtgtggccctttttattattgatggctatttaattttataacactatcgtattttctttttcatgaatcatttcaataatgacattatcttcattcattactgctactttaggtgcatggtttttaatttcttcttcattcaactgtgcataagtcatgattatgactacatcgcctacttcaacaagtcttgacgctgcaccgtttaaacaaattttaccactacctctttcaccagctattacgtatgtttcaaaacgtgcaccattattattattcacgatggctactttttcatttggcaagatgtctaccgcttccaatatatctgaatcaatcgtaatgctacctacataatttaaatttgactcagtcactcttgctctatgaattttagcattcatcattgttcttatcactttattcagctccaattattatattatctattaaacgcgcttttgaaaatttaacagctaacgagataaatatgcgtccagttatttcgtgttgttctactaattgaggataactataaacagcaacttcttcaatgcgttcacttatatgtgattcaagatattcagtaaccctgtctataattactttactttgacgttcaccgtcttgatacaacgcttgtgctaatagcaaacttttacttaaatgtaccgcttcttgtcgttcttgctccgttaaataaacatttcttgaacttttcgccaaaccatctgcttctcgaacgatatcaataccaataatttcaacggcatgattgaagtcttttaccatttgctcgacaatagccaattgctgggcatcttttttaccaaaataagcataatccggcataacaatattaaatagcttattaactactgttaccaccccatcaaaatgccctggacgcttcgctccttctaacacatcagctaatgggcctactttgacatcaatacctaattcacctggatacatatcttctactgcaggatgaaaaacaatgtccgctcctacttctgatactaattctaaatctttatcaatttgtctcggataagcatcgaaatcttcgtttggaccaaattgtaatggattaacaaatacactcacaattgtaatatcatttgtactaactgattcgcgtaccatcgttaaatgtccatcatgtaaggcacccattgttgggataaaaccaatcgttgtgcctgagcgtttggctgctttaacaatgtgttgcatctcttttaccgtagtaatcagcttagtcattgttattaacctcattcataattttctttttatacgtatattcttctgatggaaatgcaccagatttaacttcttgatcgtattgttttaaaccatccacaccaacactaaaatcagcaaattgcttcacaaatttcgctttatgttcaacaccataatttaacatatcgtgataaaccaatacttgaccatctgtaccttttcctgcaccaataccaatgactggaattgttaagtgcttgctaatttcttctgctaaatcatttggaattgcttcaagtactaacgcaactgcaccagcttgttctacatttttcgcgtctaaaataagttgctccgctgcttctttcgttgcaccttgtaatttataccccataacgccaacactttgaggtgttaatcctaaatgtgcaacaacaggaataccaattgccgttgctttttcaataaatggtgtaatatgcgctccttctgctttaattgcatttgcattcgtctcctgataaagctttagagcatgatttaagtcttgtgtcatagagatgcctactgcaccaatcggcatatcaacaactacaaatgtatttggtgcgcctcttcttactgcacgaccgtgatgaatcatatctgctaacgtcacttgtacggtactttcataacctaatacagtcataccaagtgaatccccaacaagaatcatatcaatacccgctgcttccacttgtttagcacttggaaaatcataagctgttaccatagaaattttagtttgcttttgtttcatatctattaattgacttactgttttcaatgttattcaacctctttttgcagtattattagaaatagtataatgaatcttttatagaaaggaaagaagaagatgttatcagttgcgattatcggcccaggcgctgtcggtacaactattgcctatgaattacaacaatcattgcctcatacaacgcttatcgggagacacgccaaaacaataacatattatactgtaccacatgcacctgcacaagatattgttgtgaaaggttatgaagatgtcacaaacacatttgatgttattattattgcagtcaaaacacatcaacttgatgcagttattcctcatttaactcatcttgcacatgaggacacgctcatcattttagcccaaaatggttatggtcaactcgaacatatttcatttaaaaacgtatgccaagcagttgtctatataagtggtcaaaagaaaggcgatgttgttacgcacttcagagattatcaattacgtatacaagataatgcattaactcgacaatttagagatttggtccaagacagtcaaatcgacattgtattagaagcaaatattcaacaagctatttggtataaattgttagttaacttgggcattaattctatcacagcactcggtagacagaccgttgcaatcatgcataatcctgaaatacgtacactgtgtagacagctattactagatggttgtcgtgttgcacaggcagaggggttaaacttttcagaacaaactgtcgatactattatgactatatatcaaggttatcccgacgaaatgggaacgagcatgtattacgacattgcgcatcagcaacctcttgaagtcgaagcgattcaaggctttatttatcgacgtgcacgtgaacacattcttgacaccccatatcttgatactatttatagctttttacgcgcgtatcaacaaaatatgtaagcacatatataatataaaaagaccttaacgatgcatttagaaccacctgttcctaatatcgctaaggtcttttaattatattagactattcagcttctctaatttcttctgccacatctttatagtctattttcgctttaacaaacgtctcgttatttaccgggaaatgttgttggaatgtttcaaagttttgtatctcaacgacaacgtcatccacttcaaagtcaagaacatgtccaccataagctctttcatcatccgcaaaatgtatatgaaaaccagcagaccctacgccatgaaataattctggtgtaaaaaatccaacaatggcaccacgaatatcttgtcttttttcctcaggttgtctgcgtgctgaatcaatcaaacgtgtatatggcggttgctgagcaggcatcattcgtacatgcatatgtttaaatgtgccataaattttaacagccgaaaataaattctcacttaacatttcatttttaatttgtgcaaatacatcatcttgtgataattgttgcaatggaaatgtcttactcgctttaaaattagtaatcgatgcatacggtactttctcatcgccttttaattctataaattctttatgctcgttagcatgatatgcctttccgtctaaaaatattacttcgccatcagaccctgttaacgttgcaatccctaaattcccatgttctaacaattcattaattgtagctgtgccttctagtaagccagccattaacgtacctaatgtaccatgttgatacaagacattcgtcattccaaaaccatctccctatagttattcctcgttgtcatgctctacttcgtgattaatgcagaactactttcctttatactcaatgacgcctcaacatttttattcatgtcactaaattttcacgagtcataatactttattcaattattattttacgcaaaagtattgcctctatcaatgcttgctaaaaaaatggacctatcagtgccacgtgttactgcaacactaatagatcctcttaccattaatatatttctaattaatacttaaaataggcttagtcttctaataaatatttaattgaatcaaatgtatcttctaatgttttaacagatttatcgaacaacgcttgttcttcggcacttaatggcatttcataaattttaactgcgccatgttggttaactaatgttggtacacctaggtaaacgcctttgtgaccaccatattgaccatctaattgtatagaaacatttaagacattattttcattatttaaaatggcttttgaaatgcgcatcaatgctaatgcaataccatagtatgttgaccctttagcttggataatttcataagcagcgtcacgtgtattcacataaatttcttccgctttagcttcgctaccagtttgttcttttaatgtgtcatatactgaaatacctgctacatttgcttgtgaccaaactgcaagttcagtatcaccatgctcgccaataatactagcgtcaacacttgaaggtgcaacaccaagttcttggctaattaaatattgtaaacgtgcactgtccaatacagtacctgaaccgataacacgctctgctggtaatccagtatattcttttacaaatcttgttaaaatgtctacagggtttgccgcgattaagaaatatccatcaaagccactatccataacactcttaacgatgctcttcataatcttagtatttttttcaactaattgtaaacgtgtttcacctggcttttgaggtgcaccagctgtaataacaactaaatctgcatctttacagtcttcgtattcacctgctttcacatcaactggtgaaggactgtggactgtaccatggtttaaatcttgaacatctgcttttactttgtcttttgcaatgtcaataattacaaattcatcagcaacaccttgcgtaaccattgcaaaggcatagcttgatcctacagatccatctccgattaatacaacctttttaccaaatgttttcataattatgtctcctaacctaattgaatttattttacacgtgactacacgtaaaaatatctatactgaaattaaagattaacaattttattttattataatattatgctaccaaattacaaacataaaactgagatgtaagcggagtcaaattacactctatcgccaataaatattgatatctcaagctttagcacgtaatttgaaatttgtgacaatttttagcattctaaaattgcgtaacgacgctatttaaaggctttaacaaactattgagctttctatttttttcattttaaaaaggatggctattcgacttaaatgacttactatataacctcctattttccgccttaccctcatcatatttgatgcatcattttatagtcaaagaattacatttcatacaaactagccaatcagacataaacatgaaattgattttaaaaatataatgtgcaaaattgttagaaaattagcaaaaaatagtacttattcatttaatatctgttataatcagttttatcatttaaaaaatctatggatgttatcaagacaagtcattaatacgtaacataaagttgtgatttttcagaatttttagacaaaatattgattatttgtgctatgatataacatattaaaaaacaccgtatagaattgtttatgaatgtttgggaggaaagtttatgggaagttttttcaataaaatagcacgaaaagaggatccggctatctatcaaaataaagatggtcatttaaagcgtacacttcgggtgcgtgatttcttagctttaggtgtaggaacaattgtatcgacatctatctttacgctacctggcattgttgctgcagaacatgcaggaccggccgttgcgttatcattcttactcgctgctattgttgctggtttagttgcatttacttatgcagaaatggctgccgctatgccatttgcaggttcagcctattcttgggtcaatgtattatttggtgaattttttggatgggttgccggttgggctctattagctgaatattttatcgccgtagcctttgttgcatcaggattctcagcgaatttacgcggacttgtgaaaccaattggcatcgaattacctgcagcattatcaaatccatttggtacaaatggcggttttatcgatattattgctgctatcgttattttattaactgcattattactatcacgtggtatgtcggaagcagctcgtatggaaaatattttagttattttaaaagtattagctattattttatttgtcatcgtaggtttaacagcaataaatgttagtaactatgtgccatttattccagaacacaaagtaactgctacaggtgactttggtggatggcaaggcatatatgctggtgtttcaatgattttcttagcgtatatcggtttcgattctatcgcagcaaactcagcagaagcacttgatcctcaaaagacaatgcctagaggtattcttggttctttaagcgttgctatcgtattatttattgctgtagcacttgtgttagttggtatgttccattactcacaatacgcaaacaatgctgaacctgttggttgggctttacgtcaaagtggtcatggtgttgtagcagctattgttcaagctatctctgttatcggtatgtttacagcattaattggtatgatgttagcaggctcacgtttactttattcatttggacgtgacggcttattaccttcatgggtaagccacttaaacgacaaacatttacctaatcgcgcactagttatacttactattattggtgttttaattggttctatgttcccattcgcatttttagcacaattaatttcagcaggtacacttgttgcatttatgttcgtttcattagcaatgtatcgtttgagaaagcgtgaaggtaaagatctaccaattcctgcatttaaattacctttatatcctgtgttaccagcaattacatttgttttagtattgctagtattctggggattaggattcgaagcgaaattatacactttaatttggtttattgttggtatcatcctatatttaagttatggacttagacattctaagaaaaatgacgtagctgaataccacccaccaaaataaaaaataaaaaaaatcatttcccatctgattaacatccagatgtggaaatgattttttattttatattaagataatcgctattaccaaccttgtccagatatgtcatattgatctaagttacctgcttccaaagcagtcagtgcatcttctatagtgtttaacgccgtgtctaattgctcatatgttattaccaatggcggttggaatcgcaacacatttcctgctacagctataataactacgccatgctcaaagcagtaattacaaattttaagtgccgcactggcatcacgtgttttgagttttttgtcggaaacaatatcaataccaatgctcagacctttacctctaacatcgcctacactattgtatttagatacccattgatccattcgtttcctaacatattcccctttttccgcactagcctgaagaagcgactgatcttcaatcatttgaattgtggctaatgcagcttcacaactaactggattagcacctgttgtaaataaatgtgctggtgcttctaaacaattcataatctctttgcgtccaacaattgctgacataggcataccacctgctaaggattttccgaaagtgattaaatcaggcgtaaaattaaaatgcgagactgaactccatgtacctgttctcccaaaaccttgttgaatatcatcgacagcgattaaaataccatgttcacgacaaatcttttctaacgcttcaaaataccctggaactggttctaaaagtccaccatcgccttgtatcgtttcaataacaatacatgctacttcgtcagcaggtacatacttcgcaaacatttcttttaagggtgctaaatattcttctactgaattagcttgtggctgctcgtacataccacgatatttatctggaaacggaatatgataaaaaccattcaataacggaccataatgtttgcgcatatttaaactaatagctgacatagacaatgagccaaaagttgaaccatgatatgcattagtgaaactaatgatataaggacgccctgtatatgctctggcaaatttaatgatgccatcatttgcgtctgatccggttaatccgaaggtcactcttttttcaaaatctccaggtgcaatctcacaaagcttcttagctaaacgtaccaacggttcatgatacatatatgctggtgtataatgaataaatttatcaacttgtgcctttatcgcttctgttacttctctaggtgcatgacctacgttttgagaactcgcactcgataacaaatcgatatatgtcttcccctcaatatcaaccaatgttgctccatatccatgatcaatcactaacggataatatttaatacgtcctgatttcgcaaaataatgttcatcctcttgaattaattgatgtgctttactcatatacattcccctcccattgacagtattaatgtgcaagcaaagtggcctctcttaaatcgattataaaatccgatttaaaatcctgctcaaataccgtcatgcctctatgaatactatccaatatactaataaaattcagatttgtaaatatattctgataattaagaattttatatcaatctactttgtttatgcgcataattttgttcgattagggaattgtttactatattccatttgactctgaggtgatacgaatgcgtttaaaagtattgttccatttcattgctgctattttcatatcattcatgttgctatggatgaccatgttgtttgacttaataagcaatcaatcacatttaaaagctttattattgaatttagattttctaattccttctgacaatacaccatatattctagaaataatatgtcacttactaattggtagcgtcatttattttgtatttgtgttgctgtttcatacttctaaaaggctttactatctatgttatatccctttatttttcttatttatagcattgtatccctttttagtatttattgcgcaacgtccaatttttcaatttagtgtgacagaattaatcggttggattattacacatattttctttatgtcattaatggcgttagtcatacctagaataaaataatatttttaattaaactgacaattatttttcacattttatacacttttcaaggtttatgacttgagaaatgttctcatttttatcatactggaggtgtattgaaaagttaaggagtggaaagtatgaataaagagcaattagaaaaaatgaaaaatggaaaaggctttattgccgcattagaccaaagtggtggtagtacaccaaaagcacttaaagaatatggtgtaaacgaagatcaatatagcaatgaagacgaaatgttccaacttgttcacgatatgcgtacacgtgtggtaacttcaccttcattctcaccagataaaattttgggtgctattcttttcgaacaaacaatggatcgcgaagtagaaagcaaatacactgcagattacttagctgataaaggtgttgttccgttcttaaaagtagacaaaggtcttgctgaagagcaaaatggtgttcaattaatgaaaccaatcgacaacttagacaatttattagaccgtgcaaacgaacgtcacatttttggtacaaaaatgcgttctaacattttagaattaaatgagcaaggtatcaaagacgttgttgaacaacaatttgaagttgctaaacaaattattgctaaaggtttagttccaattatcgaaccagaagttaatattaatgcaaaagacaaagctgaaattgaaaaagtattaaaagctgaacttaaaaaaggtttagatagcttaaatgctgatcaattagtaatgttgaaattaacaattcctactgaaccaaacttatacaaagagttagctgaacatcctaatgttgttcgtgtcgttgtattatcaggtggttacagcagagaaaaagcaaatgaattacttaaagataacgctgaacttatcgcaagtttctcacgtgcattagctagtgatttaagagctgatcaatctaaagaagaattcgataaagctttaggtgatgctgtagaatcaatctacgacgcatctgtaaacaaaaactaatttatacattaaactattttttgatataaactactaaaaaggactcatacatgtgctttaaaggcattgtgtatgagtcttttttgattaaagttgattttgccgtatgtattagattacgtaaaaaaatcggacagctgaaaaatctttaagatttctcagttgtccgattttaaatatagctattagaatttagttttcgtagtaacctaattctaagtcttttgaagtttgtttacggatttttctcattaatttttcgtcttcaattaatgattcaccgtatgatggaatcattttcttaattttaggtgcccattcagttttgtattcagggaagttacgttctaatacttctaacgcaactgaaactgaagttgaagcccctggtgattcacctaataatgcaattacagtgtggtcttgtgagttaaccacttctgtaccgaattggatgaatcctttaccgtgttcaggtgtatctttgataacttgtacacgtttaccagcagtgtataattgccaatcttcattacgtgcttctggatagaaagtacgtaagtggttcatacaaccttcttttgtcataattacttggtcaaatgagtatttaattaaaggtaagtttttaactgctgctgctaataaagttgtaatgttgtatgttttaacagacttgaataaatctaagttagaaccatttttcaagaatttaggtccaacattagcaaatggtccaaataataatgttctttgaccatcaatgtaacgcgtatctaaatgaggtacagtcattggtggtgtaccaggtggctctttaccataaactttggcatcgtgttgttcaataacttgtgggtttgtacaagctaagaattgaccactgatagggaatccacccaaatgtttactttcagggatacctgttttttgtaataatggaattgctccaccgccagcaccgatgaatacgtagtcagttacttgtttgaatttctcaccagttaggcgatttttaacagtaacttcccattgaccatttgataattgttcaaaatcaacaacttcatggttaaattgcactgtagcatttggatgtgcttcaatgcttttagccattttacgtgttaattcaccgaagtttacatctgtaccttcgtcaattttacttgccgccatgataccagggttatcttcacggcctttcatcatcaatggaatccattttttcattacttcgatgtcttcagtatattcgatattatcgaacatagggaaagctttcatcgcttcgtaacgatcttttaagaatttaacattgtttttacctctaacataactgatgtgtggtaatggattgataaattctcttgggttctcgatgctaccgcttttcactaagtgaccccagaattgttttgaaatctcaaactcttcgttaatcactttcgctttttcgatgtcgatagaaccatcaggttgtaaaactgtgtagttcaactcacataatgctgcatgacccgtaccagcattatttctttcgtttgaactttcgattgcaggacgatccaagcgttcgtaaacgtggatattccagtctggctcaatttcttttaacattgaaccaaatgttgtgctaagtacaccggctccaattaaaacgatgtctttactattagacttagccattggtttcacctctccaaaaattgtaaatgtgtatcatcaatatgaaagttacataaaactgacatatttctttaaaatatcaacgccattgataacttcctgttttaattgatacgctgtaacaaaatactatagttagtgcttacatgtatatgttaaagcaagcagtggtaaatgtaaattataattattcattaactttgcaatatattaaatcttttattcatagaagataaatatcaaatcaatcataattatttgacaacaaatagctaacgattgttttaatctacatttggcttatagcattttaaacctatactctattttgatacaatataagtgtaaaatcaatcataaaaaggatattcaatatctgcatccaagaaaaacattacaattacctttaatattgaaaattattttgaatcttgcacttataggtattgtaattatcgttctaacacatactgagtttcaacttaatgccggtgatagtaatgtgtttttattaaactgggatattcgaggtttaacatcttatattttctcattcttaatactggttgcgcttgtttctaaactaattttaatatttataactagacgacaaagaacatcataaataaacaagcagtccagtgcgtatcatcataccttacgcattggactgctttgctatgtttattgattgctatctttttgttgttgccatttttctatttcagcatctcgtagttcaacacgacgaattttacctgagtttgtttttggtaagtcgtcaacgaattcaatctctctcggatatttatatggtgcaacttcatttttaacaaattgttgtagttctttaactaacgtatcatcacccgcagtatggtcctgtaaaataacgaatgctttaacaatatttcctcgtatatcatgaggttttgctactacagcacattctttaacggctggatgattcgttaacgcatcttcaacttcaaaaggcccaatcgtatagcctgaactaataataatgtcatctcgacgtccttcaaaccagaaataaccatcatcatctacatgagctaagtcaccagtgatgtagtatttacctgtttgcgctttcgccgtacgttctggctctttataataccctttgaaaagtgctggcaaatcaagtggtactgcaatattccctttcgtattagcaggtacgctattcccctcatcatctactacagtgaccgaactacccggaatgcctttacccattgatccaatcctctgtggtgtatcttttaaaaagcctataagcaaggtactttcagtctggccatatccatctcttacagttaaattaaagtatttcttgaattgttcaactacttctcgatttagtggctcacctgcagaaacggcactatgtaaatgcgttaagtcataatcatttaagttctgtaatttagccatcatacgatattctgtcggtgtacaacataaaacattaatttgatatttttgaagcaattctaagtatgtttcaggactgaaccttccattaaatacaaaagcagttgcacctgaacctaatacagataagaaaggactccatacccatttttgccaacctggtgctgctgttgcccaaactaagtcatcttcattaatacataaccaatgttttggtgccatttgtaaatgtgcaaatccccatccatgacaatgtgtaacggctttaggattgccagttgtaccagatgtatatgacagaatcgccatatcatcacgcgtcgtatctgccatttctagtttgttacttgcgttttctttttcagcttcaagtgaaatccatccatctttttgaccggcaataacaaatttagttaacgcatcatattctttaattttttcaaattcaactgtgaatggctctagtgcaataactgcattaatttcaccatgtgtgatacggtattgtaaatctttagttcttagcatttcagaacatggaatgattgcaacacctaattttaaagcagcaatatataattcatacgtcgcaatagatcgtggcatcataatgagtactttatcgcctttagataaaccgtgcgatgctaaaacattacctactttattagactgttcaatgagctgttggtaagtgactgatatatcttcgccttcagtattatgatataaaattgcctttttatctggtatgtggctatatttttcgatttccgaaataatgttatatttttcaggcgcgaatagagctgacttttgcataactaacttcctttcatacatccacttttcctgtgatgaacattgtaattttataaatgaattatatacatcatacgcctatctttacagaattttcaattaaatagggttaaataccaaagtcctcgacactacactttgacatgacgtagcattcaaggactttcaaatgattgagggttgatatctcgggctagaccatatcagctaattcaatacgaatattgtatgataattcacgattaattatttttacatctgcacctttcgaagtgccacgatgcttgtgtgtatgcttgtactcagctgaattttgccaatgataaaatgcttgcctattttcccacagcgtaataatgatatagtgtctaccagctgttctaggtcttaaaaaccttaatgctttaaatccatcaacgttttttaaatgcttattacgtcgcaaaaatttttgctcgaatgtttcttcttgtccttcgttaatatataaatgatttaacacacataatgaatcatttgataaatcatttatcgcttctagcacatcgtaatatgcagtgtcattatttttttgtattgtgagacaatcatccagttcttctattacataacttctatattcatcataaattttcataataaatgccttcatttcatttatatttttggtcatattactttatatctattactaattcattcccgtatttattaattacaatcatagtttggcttctttttaaaagataagactttgtaaaaagtattaatatttcatgcaaatgggggacaggagtcgcccactatttttgtgtcttcaatttcatgatcattatttaacattagtcatgaaaatagccgacaacttcatctgtgaaatcaccggccttttattttagctaactttatttctgattttacgattttaattgatcatacagagaaagtgatctttttacaatttctaaaaactcatgatctatattggacatttgatgaaaataagacaaaatgttttctgttagcttctcttgttttgggaatgaatcatcttctttaatccaaatcgctaattcgcctaatggtgttttatcatctttaaatgtttgtatatattcgtaaaagctcatagtattccttctctcaatttacttatataaatcctaccacgaaagctttcaagaaaacacaattaaatgtctatttagtgaactttttaaggttgtgcactcttttaatgtctgccaattaggtcaattaatcatcacaatgtacaattaactctattttcagttcatatactcacacaccgtttttgaacaacacattaacttctcatttagataaaacgcaaaaaagcctggcaccaatacaatagatgccagactaagagtctactatataaatttatttagcgtatggttttacttcgattgcaccttcattttcatcatgaacaccatgcttataataatcaatatattgtggctctaaaggctttctgccacgtataatgtctgctgctttttcagctaacattaaaacaggtgcgtgtatattgccatttgtcgtacgtggcatagctgatgcatcaactacacgtaaattttccataccgtggactttcattgttaacgggtcaactactgccattggatctgaagcaggacccattttagcactacaagatgggtgtaatgctgtttcaccatctctacgaacccaatcaagaatttcttcgtctgtttgcacttctggtcctggtgaaatttctccaccattgaatggatccattgctttttgagataagatatttcttgctacacgaattgcttctacccattcttttttatcttcttctgttgataaataattaaagcggatacttggtttttcgaatggatctttagatttgattttcaagctaccacgagagtttgaatacattggtcctacgtgaacttgataaccatgtgcgaccgctgccttttgaccatcatatcttacagctattggtaagaaatggaacattaagttaggataatcaacttcgttatttgaacgtacaaatccgccaccttcaaaatggttagatgctgctgcacctgtacgtgtgaaaatccattgtaaaccaataaatggcatgcgcttgatatctaagcttggctgtaatgatacaggttccttacatttatgttgaatgtatacctctaagtgatcttcaaagttttcacccacaccaggtaaatgaacacgtggctcaatgccttttgattttaggaactctgaatcaccgataccagataattgtagtaattgtggcgtattgaatgccccaccagacaaaatgacttcattagcatcgatggtatgtagtttgccatttttcttatacgtaacaccagttgctcttctaccttcataatgaatttcagttacaaaggcacgtgtttcaacggttaagtttttacgcttcatcgctggatgtaaatatgctcttgaagctgacattcggcgaccacgatgtacttgactatcgaacggtccaaaaccttcttgtctaaatccattcacatcaggtgttttatgatagcctgcttcaacacctgcatcaaagaatgactggaataaaggattcgttgctggccctcgttttaacttaattggtccatcatggcctctaaatttatcataaggcgctgcaccgtatgttttttctaattttttaaaatacggtaaacagtgcgcaaaatcccaagtttccataccttctggttctgcccagccttcatagtccattggattaccacgttgataaatcatgccattaatcgaacttgatccacctaaaactttacctcgggcatgtgctactttacgaccgcccatatgtggttcttcatctgttgaataaatccaatcgtaaaatttattgcctgaagggaacattaacgcagcaggcatttggataaataaatcccaaaaataatcactgcgacccgcttctaatactaagacttctttatctttatcttcactcagacgattacctagtacagaacctgcactgcctcctccaatgatgacataatcatatgatttgtttttgttactcatcgttatgacctccaaagtttgttgtatttcaaagtgagtattgcatgaaatatttgttagtggctgattggttatcgttgaattgctaaacttagctaaccaaaacactcgcttttccttttacgattgttactaacagtaatgaaataatctatgattcattttgcgtttagtccaaattatcaatcaacatttcgccacttatacaaaacaaagtgagtgtcttgtgttcttacaatggcactcaccttatctaatttttatttgctaaaccaattcactaattgtggatttgtatttgttaaaatgtgttttgaaacaaggtactcttctaagccttctttgcctaattctctaccgatacctgattgtttgtatccaccccatggcgcttgtgcaaaatatggatggaaatcattaatccacaccgttccaagtttcaacttgttagcaacgcgttgtgcttttccaatatctttagaaaatacagcacctgctaaaccatatatagaatcattcgctaattgaatcgcttcttgttcagtttcaaagccttctacagtaacgacaggtccgaaaacctcttcttgtacaatacgcattgacgtatcacaatttgtaatgactgttggctcgaagaatagaccatcttttaaatcatctctatctggacgtttaccaccaacagcaattgttgcgccttctgctttagctacatccatataagattcgatcttattacgatgttctgttgaaatcactggtcccatttcagtatcagcatcaaaaccattacctaatttgatttttttcacgcgatcaataagtgcttgctcaaatttgtctttaatactgttttgtactaatattcttgatcctgctgaacaaacttgacctgcatggaaatatccaccatttaacgcttggtctactgccaattcaaaatcagcatcatcaaagataatgtttggatttttaccgccaagttccaaggcaatattcgtaacattattagcagcatttttcataatatgcttaccagtctcaatgccacctgtaaatgatacaaggtcaacctctttatgacctgacattacgtcaccaacttcagaacctgcacctagaataagattaattgttcctttagggaaaccaacttcttccattaattcaaaaacacgtattgttgttaatggtgtaatttcacttggtttcataactagtgaacaacccgtagcaagcgctggcgcaattttccatgatgcttgtaataacggataattccaaggtgtaatttgtgtaactacacctactggttctttaacaattttgctttctgtatctggaattggtgaatcaatcatttcgccaccgtctttatctgctaatccagcaaaatacataaacacattatgaatatcatccatatctgcatatgattcttctaacgtttttccagtatctaatgtttctaatcgtgctaacgcttcgcgatgttctttaatcttgtccgcgatggcacgtacttttttacctcttgtttcagcagtttcttgcgaccattcaccagactcaaacgcacgtcttgcagctaagattgcacgttctgcatcctcttttgtcccttcagaaaccgtaaatatcacttcttgattgtaaggattgataatatctcttgtatttttattcgcgctttcaacccactcaccatcaatatattgacgctgagataaatgttttaaaagttccattcaacaacctccgttaagtttgttaaatttttatttaacgaattttacaaacttatgttagcatagaaatgaaaaatgtgtcaatttacaaaacaactcaagaattaagttttgtaagttcgttagatttttatttaacgaaacatttaactttaatgctttaaatatttttaatgtctttttttagaaaaggttttataatgtattagtatttattttaacgtgaccaaaatgatgtacggaggtgcaatgatgactcgttctcagaacaaacagcaacaattagaacaagcaaaagatattgtaattaattcaattggacagacaatggatttgtatggcactaatagaagtgtaggaaacttatatggcacaatggtgtttgaaggcagtatgacgcttgatgaaatgcgtcatcaattgcaaatgagcaaaccaagtatgagtgctggcgttaagaaattgcaggaatttgatattgttaaacaacaatttacgagaggaagccgcaaacaacattttatcgccgagaaagactttttcatctttttccgaaactttttcactaaaaaattccagcgtgaaattgacatcaatgtcgaagcagtaaaagatgctcaagctattatcaatccattacttgaaagcagtgatttaactgaagctgaaacacaagaggcacaaaaaattaaagctcagcttgatcatacacatgtttattacgaatggttagaacagttaaccgaagcgattgaaagcggtgaaattttcaaatatttcccaattccagaacagccttctgattctgaaaattaaaattgactcaaacaacgacaatgatgattatgcatgataaaaacaatgcaataggtccacgaaataaacggtaatttctatctcaataaatagaaattaccgtttttgttttatatgacaatcaattatggaggtattttctagggctttcttagattcgttacattgcttcgccaatatatttcaattagctattctcgccctcacgtactctatcaataatattttgtatttgttcacgtttttcatattcattttctacaaaataaactaacggttcatctttgatagtaacccaaggtacaagtacatcaaaatctaattctttaaccatctctaaactttgaatagatttttctctatcacttgaacctaatataactgtacgccatctcttcccttcaaaacatataaaatctccagtaaataagtaacggtgatgaccatcatcccataaaaatagtgtcgtccctggtgtatgtccaggcgcgggaataacttctaaatccttatccaacattacacgattactaaattgtttttgaacagaaatcttatgtttcagtgcagccacatcattttcatgtataaagtaaggggcttcaacttgattagaacctcctatagattcatgatcatgattcatcaatacttttgaaacaccacctaatgatgcaatgtcttgttgggagtcacctaagtgtccggaatgatagataacaatattacctgtttcacgttttaaaataaaagatttaaatagaaatcgattatcaaaaggcagttccgaagtaggtgtcgcatataagttttttgtgatggattctaaactgtcatgtaatttggactgtttatttttaaattgattagtcattttatttcatccttcgattaatttgaattgtacatacgcagtaccctttatttaatttaataatcaatgagagtctttcaaacttcgatttagaatatgcttcatacaataaataagtacttggagcactaaaaaattaaatcttttagtacaacattaatgaaaacctaaaagttcatcctacaatgctactaaaaaaaggggaatggaacagaaatgatattttcacaaaattcatttcgtcgtcccagacccgctttgaattataaattatcgtcttgttcttcttctgatacttgaacgattcgcaatgaacgacgttcaacttcttttaatttttcagcacgcgtttcaagtttaattctatcgcgccctaaaatgattaaaaatgatatcatcatgaaaataaaaataacaattaatggcacacttgccagtattgaagcagttttcaatacttctaatgcacgttcaccaccaactagcatcaatgaaaatggcaataagcacaatgcaaatgcccagaataaacgattggcacgtaatggttcgcctaccacttttttctgagatgctgccgctaaaatatatgaacccgaatcaaatgttgttgctaagaataagaaagcagatactaagaatagtacaatcatcaatgatgggaatggtaaatgatgcaccacttcaataatggttgcctctgtaccatgtgtatttaaatattgtgttacattaaactgtccagaaatttgtaaatacacagcatagttaccaaaaataccaaagaataatacgcatccaagcgttccataaataattgttcctagcacgacttctttaaggcgtcgaccttttgaaattctagcgataaataaaccgataaatggcgcatatactaaccaccatgaccagtagaatattgtccagtcttgtgggaaattcgtttcttttcgacctttaataccaccgaatggttctaaccatgttgccatatgaaagaaatctctcaacatatttccgaaccctgtcactgtcgtttccataataaaaacagtcggtccaataataaatataaaggctaaaagtacaaaggatagccaaacgttgatatcacttaacttttgaataccttttttcaatcctgtatatgaactaatggcaaatataaccgtgattgttaataaaatggccgaacgtaaaatcatatttttaccatctaaaccagttaatctttctatgcctgcagaaattaatggcacacctaacgctagtgatgttgccgcaccacctagcaatccaaagataaataagatatctacaactttacctacaaatttatctgtttgaccttttaaaatcggacgacaagcttgactaattttatacaccggttgttttttaacaaatactaaataaccaattggtaatgctggtagaacataaatagcccaagcaattggcccccagtggaacataccatattgcgtcgcatattggagtgcttcatcactcatacttttcgcgccatttggtggaacttgatagtaaaaagcccattcaataacgccccagtataaaatatcagagcctatgcctgcacaaaacagcattgccgcccatgtaaatgtattaaattctggtttatcacttgctttaccaagtgtgacattaccatatttaccaaatgcgatatacattacaaagcaaaaaatcgccagccccataaataaatatatcgaaccaattgaatcagaaatggcactattaataccagtgatgatatcttcacttgcttttggaaaagccatcataggtataactgcaaaaagaagtacagctactgtccctataaaggtcgtccagtccataactttctcttttttcaattgtgctccccctaattattaattttatgaatcctgtttcgatttatctcaaaatgtaataattatattgattcacaaaattgacaataactaacatttaataataatgcaaatttcatacaatttgaaacttggcaattattgaatatttatataatttttcccgtaataaacaaaaccttaatagcgctaaaataacagtgttaagttacgatttaacgaatttaacaaattttactagaatggcatttaagaatatttatacgttattaacgaatatttatttattgtaaaacgctaccaaaaagttagacttccttcccactaaaataccacttttctctttcaacttttttaaaaaacggatatgcaacttttagtattggtatcaaaatgattgttaggtcatattctatcaatatatttttataaagaattgcttttattaactttcaattatgtacctaacctaaaaagaagccaaggcaacgaatgttaccttgacttctaatacatattcaactaactatatattcaatcatacgcgcatgcgagagtgattgttgtacatctataatgcgttgatttaaagaacctttatatggtaaatcaggtttgaataagtgttgtataaatagaccatctactaaaacgtcaatgtatgataataactctcgacgttctgtacaatcatttgctaaatattcatataaaaatccagtccatacccaaattgtctttgtatttccaaaacgtgctcgaaatgctttgacaagatttaatgtaatatccaaattacaaaatggttcgccacctaatagacttagcccagatatataatcatgatcgcaatcatctaatatttctgctaatatttcatcagtgtatttctcgccatatctgaacttttgtgaggctttgttataacatccaacacaattaaatggacatcctgatacataaacactgcatcttactccttcaccgtcaacaaagctatttgattctattttagcaatataaccttgtccttgtttaatgtctaaaagtatcattctttaggcgctttcatatgttttactcgtgcgcaaatttctttatgacggcctttaattactggacgttgaactggattgcctaggtaaccacatgttcgtttaacgacatcaactgttttaggattatcattgccacagttcgggcatttaaatcctttttcagttgcttcaaaatctccatcgtaatcacattcataacaatgatcaatcggaatatttgtacctaagtaaccaactttgtcataagagtagtcccataccgcttctagtgctttcaaattgtgttgcaatttcggatactcacaatagtgaatgaaaccaccactcgcataataaggataatctttttcaaaatctaacttttcaaaaggtgtaacatctttacgtacatcataatggaaagagttttgataatatcctttatctgtaatgtctttaatatctccaaatctctcttggtctaaacgacaaaaacgatccgttagcgattcactcggcgtactgtaaatactgaaccaaatgtcatataattctgtccatttcgtttgataacgtttcatttctttaagaatttcaagcgtaaatgcttttgcttcttgagatgtttcccagtctggaccatagaaaacagtagctgtttcatacaaccctatatagcccattgaaatcgttgcacgtttatttttaaataactcagcaacatcatctgtttcttttaatttatagttaaatgcgccacttttatataaaatcggtgcgttattcggtacagcatctttcaaacgatttatacgataaagtaatgcatcatgtaacacatcgatacgttcataaaagatttcccagaatttcgtcatattaccggcagattctaatgccattctaggtaaattaagtgtaacaacaccaagattacaacgaccattattttcaaaatgaccttccgcatctttccaacttggtaaaaatgaacgacaacccattggcgctttgaaatcacctaatatttctacgagtttgtcataatttaaaatatctggatacatacgtttcgttgaacactttaatgctagttgtttaatgtcatagttcggatcttgcggactaaagttggttccttttttaattgaaaatacaagtttcgggaaaatcgctgtcgtgcggtcttttcctaagcctttgatacgagtatttaagatagcttgttgaattttgcgacttaaatgatctgtacctaagccgaatcctaatgttacaaaaggtgtctgtccattagatgtatataaggtattaatttcatattctaaactttcaatcgcatcattgatgtctttagtgacttgttgatcaacataacgatcaatttcagattctttgacaaattgctttgcgatattcctatgttgttcttcattatgtcgtgcatatgtactaagtaattcgtcaacgcggtcaaccgtacagccaccatattgactgctagaaacattggctataatttgtacaagctgcgctgatgcagtttgtattgattttggtgaagttacattcgcgttgcctatttcaaatccattatgtagcatatttttagcatctattaaacaacagttagttaacggttggaatggatgataatctaagtcgtgaaaatgtatgtcccctctttgatgtgcatctgcaacgtgctttggtaataaatgatttaatgcgtaagatttagaaacgatacctgctgttaaatctctcattgttgaaaatgtatcactatctttgttagcattttcgttaacaatagcaggatctttagaaatcaaacccgttaatgcttcttcgatttgattcattttaccccttcttcctatatattgtgtctactcattacgttataccactatatatagtattttcaaatttttattagtctgttaactaaaacgtcacaaagttattaacatttagtgaaattcatatttctacacaattatttcattaatttttaaaattgtttaaagattcgtccgtcatttcgacatgtttatgcaactattatttcattttgcaacgtgaccatagtttctattttttcatacttaaatcgtcacaatgcccatcaacattgcaattactaacataacgatagcgaatccccaaatccaaaagaatgcatacttaatatacgtgcccatgtttgcctctgctaaaccaattgccaaccataaggctggtgaaaatgggctgacaaatgtacctataatattccctatgaccattgaataagctgttgatacagacggtacaccaaattgccctgctgtttgttcgacaatcggtaacacagcaaaataataagcgtctgtgctagttagtaaatctaatggtacgccaagtaaacctacaataatatgcaagtatggtcctacttctgcaggaatcactttgattaaattggtcgcaatcgctttaagcataccggtttcatttagtacacctaaaaacatacctgctgcaataatcactgcagccatcattaatgcattcggcgcatgcgctcttaatcgttccatttgttcatccactgatttaaaattaataacaagtgccaacgaaacacctatcatgaatgcaaattcaggtggcgcaatatttattaacatcgatagaataacagctaaagttaaagctgtattcacccattttatccatgattttgttcttgcacgtccttttacaggaaaccttacatcttgatctcgttcatatacttcaactaatttatgtacatctatatcttgtgtttgcggtaattcatttctctctattgcttttttgatacgtttctgttctttaaatccaagatataccgcaaacaacataacaagaatgaaacctattatttgaataggtattaatccataccataattcattgacacttttggcttttaacactgcagctacacgagccattggacctccccaaggtaccatgttcataatcgccgcgcttaatgctaatagtaaaatcaataaatatttattcatatttaacgctttatataaaggtaataatgcaggaatagaaagcaaaaatgttaccgcaccggccccatctaattgggctattgtgccaattaaagctgtcattgcacagacaatgacgacattgcctcgtgtcattaatattaagcgtttgacaagcggcttgaataaaccactatcgttcatgatgccaaagaaaataatggcaaagataaacataataacaacgttgatgacttgatctaaccctttagcaaaaaatccaaccaaatctgtcacactatatcctaaaatcattgcccctaagcaaggtatgattgtcatacctacaactggatttatctttttggcaatgagtaaacctacaattgaaataataataatgagccccattactgttaaccacatattatcactattcatattattttctccctccacttttaatacaatttacataatccccctctttaacttaaatattataattaatataattttttatatttaagttatctcattttatcaaaaaaatcttttttgcgtaactatcaatagtgaagtttgattttcctacttgataacatggcatgactaatccttgtatatcctgtcctgtatttcattttgatctatcatttttattattgctttctattgcacaaaaaatctggctaaaggtcgctatgatagtaacgacttcaaccagatttcaatttatccacctattttattaagtttgttctacgtatctttttctctattgtaatattcatatttaaaacgcatatcattatcgcttaaatccttcattattagactattcacaaagccgcccatgtcttaatttcaatgattaagcgttaaagttaaaataagaagacttaccttagacggttagacggtccgctattattatcttacatccaaccacgctaaaaattgagcttgtttgtcatgatttaaatattcttgtgacacaatttgtgacagtaactgttgcttttcgttatatgttatatcaagtacttttattttctgtcggcaagtatataaaaagtcgatatacgaactgtatgatggtggatataacgcctcaagctctgccataattgattttgtcaacttaggactcgcaccatcagttgatacactgatagttagcttgtcgcggtgtagtgcacttggaaatacaacattgccatttgatgcatctccaacattattaaaaagggcatgctcaggtaaggctttttttaccgcttcattgacacgtggctcattggttgctgcaataactagatacgcgtctacaatatcgcttggttcaaattctttttctttccatatgacgacaccgttatctaccatattttgaagtttttcagtgattgtcggactgatgaccgtcatatgttcaacgtattgatttaatgtttgtgcccgacgacttgcaacgacgcctccaccaactatgacgacatttttatttgttaaatctatcattaatggcatattcatgttgagcaacatcctttatatctttttacatcattacaccttaaaatatttaacaccaatcgctaataaacatcacgttgatagcgttgttgttgtttcatttgtcgcaataataactctgcttcttcttgagaaatatgacgttcttttaccaatacatctttaatggcttgatggacatctttcgccatacatttttcatcgccacaaatatagattgctgcgccttgctcaatccattcattgaaacgtttactttcttccattatacgatgctgtacatattctttgtgttcttggtctcttgaaaatgctaaatctacgcgtgttaagtttccattttcaagccattcttctatttcttcttcatataaaaagtcagaactacggtgttgatcaccaaagaacaaccatgtttttccagtcataccaagttcttcacgttcttgtaaatatgctctaaaaggagcaattccagtacctggtccaatcataataaccggtatatcttgcttcatcggaaatttgaagttcggatttttcttcaaataaattggtactatatcgcctggtttaattcgctcagcaaaatgaaccgagcatacaccttttctctcacgtccatgtgcttgataacgaaccgtaccaacggtaatatgcacttcatctggcgttgccataaaactactagaaatcgaatactctcttggtggtaattttctaaggatttgatacatattctcaggttgtaattctatagttggaaaatctgttattaaatctataaagtcccgatttataacatattcacgcgcccatgactcatcttgaatacgttcagataattcttcattgtcaaaatagatatctgcatttttcaataatggcaatgttaatttagtaaattcaaaatgtgatgttagtgcttcaacaataggaactgtatcaccatgatcattaattggcaccggagattgcggatcccaacctaacatggatattagtttttcaaccaattcagggtcgttttgcggtaatgctactatacaatctcctggttcatatgattcactaaaatcatcaagtaaaaattctatatgtcgtgtttctttatttgaatcggtaccatttaaattgatattcgctaatacttctgcttggtatggatttgatttagaatatttcttttctttggcagacttaattgattcacttatcaccgattcactttgaataccttctgatgtggtatcaataatattaatgatgtctgccatccacttttctgcgtcttcttcataatcaatatcacaatctacacgcttacatatacgctcagcgcctagattttctagtaaaacatctacatctttaccggcttgacagaaaaattcatatgtttgatcacctaaagctagtactgaatatctcacatgatttaaattaggtgcgttatcgtcttctaaaaattcaaagaaatcccatgcattatcaggcggttctccttcaccatgagtagacgtaataataaataaatcttctaactgcgcgatgtttgtcgtatcatattcatccattgacatcaaaacaacttgatgtccgatatcacttaaacgttctgaaaaaatttcagctaaacgcatggcattacctgattcagaaccatatagcactgtaacatgccgctgattagcttcgatatgtggctctttattttgtaacatatacgttgttgaagttgcttgttcttctgatatttgtgattgttgccacacttctgtctctaattgttgttgattactatcacttgtcgtatcgttactattagctagtaaaaaaccactaagccactgttgttggctctctgttaatgtttgcagcagattgttaatctctgtgacttgtttttctgtaaatggactattagatgtatttaatttcaaatgttttcacctcaataaacttgaaatagatgattgactctttttttatcgatagtttagtcaattttttaatatgtatggtataaattaaaacaaacttgagttgtgtctgatagttatacttgcaaatatttacaaccttcatgttgcttgaatgacattatcagtaattcagacaaaactttgattatgtcgtgtcagttattaatgcatacagtaatgcatcgttgttattttttatttatttactatttattatgtaccaaatcagcctttcagtaaaataggtcaaattactgattttctaaatataaaatgcctcctaataacatactattagtacatcattaagaggctcttgtgttatttgcatactaagcgctcaaatttaaatttaagatgaagattcttgcaataatatttctatatttgtcgatatatccaatggatcttccattggcaagaatcgatttacaacatttccttgtcgatcgattataaattttgtgaaattccattttattggggacccaaagattcctggttgttcattctttaaatgcgtaaataacggatgttcatcgttcccgttcacagatattttagctaacactggaaatgttacaccaaatttctcacgactaattttcaagatttcttcattagaacctggttgtcgattgtcaaaattattattcggaaaactcaacactacaaacccacgatccttatatttttgaaataaagtctctagttttttcaattgttcgctatatatacattctgttgcagtattaacaactaaaatcactttacctctaaatgcttctaatttataagttaagcctttataatcacttacttcgatatcatacacatttctattattcataagacacccctacacagccttttttatattgaatatgttctttttagaatgttctgataaaataagtgcgcgtttacaccgtgaacacacattatatagcgtgatacatttttcgagcacacgataaataatgttcgagtttatgttgttgctcaacctatccgatttaccgtcttttttcacctgtcttactttattaaaataatcacattgtatagctgtattagtccagctacaatatcttccgttataacccctcattataatcatccttattttctatttttaaaaagacaattagaccgctctttaaactatagattaatacttaagttaaactcatacatactgataccatacgttagatctaacaatttaaaattcgttataactatggattaaagagctgcccaactcatataatccttaaaaacttcacatgtgattgtttattaagccctcctttatcttattaaatatccttataacccttttaaaattaaactgacacactcatacattgttacacgcgacgataaacgtcatattattgcatatcattaaaacaagtcactttgtatcgtgtgcgaccgaatacatattaaatcatcaataatgattattcaattattaaaaataaaaacgaacattctatatagagtttctacttattgttttttcagcattgtctacattacttaacattcgtgtttgtaagtaatattgaccgccaatatttagacactttataagtatgccattcatcatttttaatcatattatttttcttattgatatttctattcatatatttctgattgtatatttagatataataatttgttattggaaaatatatgaaacaaatttgactcatctttttcaatatctaaatgacacgatgcatgattttttaattttgtaattaacttccttttaaattagactgaattgtgacaattttcaaacattttaatgtgtaaatcattggcaaaatatacgaattgcatttaaatcgtcaatttacatatatttttgcgtagtaatcaatcgttatcattgttatttatcgttacattatttcgagtatcagtatgtatttcgggcttcgtttgataacgacatttctttgtgacatcgcttcatcagtgtaacaacaaatacaatgatttcgtgatgttagttacccattttatgtgttgcataaaatatgttgttataaaacattttaaatcattttatataaacaatctatatatttttggcatttccaaaatatcacttgttatattaaaaaccgacaagacattttatcttatcggttgaaatttgttattgttatttgtaatgtttttaggtttctttttaatataatatatttcagtgaaaatacatgattgattgtgatttcactgaaacatggttaattgcgttgttgatgaataactttagcataaatataggaagttattttgtacatcgccatatatagaaacgaaattataatgacagctagtacgtaacttgttaaaaatatatgatggttattaatacctatcatatttagtaacgtatatacaatgttactagaaattaatgtgtgaatcagtgctactgttattggtattgcgaacaagaaagtcatttgatttcgtgttatctttgctattcttccattatctaaaccaagttttttcataatgtcataattgtgctgatttgcataggcttctgagacttgtttataatacatcattagaaatattccaatgacaagtacaattgatactacgccacctacaaatattagtccacctgtcaaacgatcccaaaccattagcatttctgatttagaatttattgacgcatcgtattttttcgatagcttttgtatttgtgatgttgttaatttcgtctttccaaatacattaaagtttatcgatattgtcgaattcttttgttcatgtgcataaaatccttttactttttgtaattgattgttatctttaacaattaaaaccatactatcttgaatcatcatcaaatttaacgcatgtgcgtcaagttgtttcactttaaagacttcattattaagaccgaccttagactgctttttaaaaataggtacattcgtaatcatacctatactttgattgtctaagtgtaatttgttttggtgatatcgattataatcttgtgcagtaaaagctgtaatcattactgattgtcttgaaaatatcgcgccttcattaccaatgaagtctattggaatatcatcactagcctgttttaacttgtaataagcacgattcttttctaaagaagctctaaataatgtcgtttcatatactttgaagtcttttgcattaaccgaaccctgtatatcacgtttaatattctcaattgtttgttgacgttctatttgtgacttagaattgtcgctaaatgacaaatcataatcattcgtaatcaatttcgtaatggtatgattcatatcacgataggttgttaatgtcattgtgagcgttacaatcaaaaatgtacacagcaaagtgattgttgcaagactgactgcattcattttaagacgtacacgcatcccaactaccacaaaaaaataccgtggatgatagtaaacttttgatacctgctgcaatatactaataattatttcacttatacctacaaaaaatgcataagtaccgataataactaatcctatgacaatccatattttaaaaaaggcaccaaacgtcgtatcttgttgtaatgcaataaagtaacctaaatatagtgctgcgcttcctataacaattaaaacgtaacgcaaccatcgtgatatgacactagaatcggaacgatgttgataagttatcggccgttgaaaattaatactaaacaagttgaatataagtagcatgcccattaatacagcaatgataatcaaagtaataaacatcgctacagagtcaaatggataataccttaacgtcgcaacttcactgcccattattttctgtataaacaagaaaaatatcgcaccaagtaagtatccgccggcaatactaacgactgaaattatcacaaattgtaagatagtttccatcactacaattaaacgcatacttttcttggtcatgcccaatgtcataaaaatgctaaactcttttcgtctttgtgacatcataaagtgatttgcatagaaaataaaaataaaagttaaaagcgccataaaaaaattagctatgataataaatggtactaggaagtcattcttctgttttatgtagctatttaacccaattgacacaagcgtatattcaatcatgaatagtacacttaccgctaaaatgaatggaatgattacaagtcgctgcgtaataaattgacgtcgcactatgtgccataacaatcttaacttcatatattgacacttcctccattcacaagtgctaagctatctgttattcgttgttgaaaagctaattgactttcttcaccacgatatatttcatgatatagacgcccatctttaataaaaatgactcgctctgcataagacgcatcgatatttgaatgagttaccattaaaattgtctgttccaattgatgaatctcttgaaataacatcatcaatgcctttgatgtttttgaatcaagtgcacctgtaggttcatcggctagtaaaatcgtcggcttagtaactaatgcacgtgcaatggcaatgcgttgcttctgacccccagagatttcagaaggatacttgtttaagaatccctctaaatgtaattgtactgccaactgatgtaccctttgttctatatcttttcgtttagcaccagctaaaattaatggcatcattatattttctttattcgtcattgttggtaaaagattaaaatcttgaaaaacaaaacctaccatttgttgacgatacaatgctttacttttatttttcatattatttaaatgtgcgccatccacaataatgtcaccttcagttagtccatcaaaagaagcaattaaatttagtagtgtagacttccctgacccagactcacccataattgcaacaaattcaccagctccaactgataaattcatttgattaagtgctgtcgtagcattcaaacctttaccataaaccttttttacatgtttcacttctagcaacatggcatgcacctcatttctttgttagttctatattaaaacaaaaaaatactaataacatttaaattagtaaaaaaatgttactagtatacttacaatattgaaagtttttattcatctggaaattgaatcgtaaatgttgtaccctcattttgtttagatacgactgaaacaggatggtttgtgtgtgttgaaatttgttttacgataaataaaccaatcccacttgagttactttggcgctggccattataacctgaatagcccttatcaaatattttaggcaagtccgcttcactaataccgataccattatcttttacgtgtaattgattggattgctcatcaaattcaatccatatatctttacctctcgcatacttaagtgcattatttattaattgttctatcattaaagaggtccatctaacgtcagttaatacttcgtgatgacaaggttcataatggatttttgttttttgatcaataaactgtattgaatatttcataataattgggcgaatgatattattaatcgaaattttagtgacagaaatatcagaagtttcatttaataactttaaataactaagtgctaaacttgtatagttatcaatttgaataacctcttgacgaacacgattaacaacattaggctcatctctttcaagtaacagttgtgctgcagtaatgggtgttttcatttgatgtacccatgttaaaaagtagctctctacatcatttttatattcaatttgttcatttttaagctgatacaacgcattttctaagttttcaatttgttgttgttggcttatagtttttacaaaacttaaatatttaatacctatgaatatgagtaataataataaaataacgccaagtgctagtaaatatgcttctaatggcaaatgatacaggtaaaacattaagccaaacaaagcaaaaataactatgactattgctatttcctgagtaatacttttaagaaaggtcattgcattcaccctatactttatatccgacatttttctttgtaatgataaaatcattaacgccaatagtatttaattttttacgcaggcgcgtcatgttaacagctaatgtgttatcatctatgaagttttctgattcccaacatttttcaattaaagcagttctacttacatatttatcttcattttgaaataataactttaatatttgtaattcagtcaaagatagctgtatgttttgttcttgatacacgacttttgcttcatctaatattaatgtacaacctttaaccgtcaatgaatcattagctactgacaagtcataagttcgtctcaataatgcttgaattttggcaatcgttaatgacaagttaaatggcttttcgataaaatcatctccccccatttgtattgccataatttggtccatattatcaatacgggaactaataaatataattggcacattagatgtttttcggatttcttgacaccaatgaaaaccatttaacgttggcaaattaatatctagcaatacaagctgaggttgattttggttaaagatagacagtatatcatcaaattgttcaacgacaataacaccgtaattccattttttaagttcagatgctaaactctctgctataacaaaatcatcttcaacaattaatattttcatctataatcttcttccttcaattgaattatcctttgttatctttttgttctttatcctgctgcaatgacggctcttgatttgaactttccgtgtcatttgtattttgatttagtgtatttgctttttctttctcgagttgctttttcttcgtacgtttacgctcttctaaaatagacaacactataaagaatatgattaataatggagataacattactagtatcatttttccacctcaaattatatttaattctatattttcacacgcttctattctaacgctttctataacaaattgtcatatatattcattttttgttattctaaatcactctgtttacatatttttaactaaaactacataattgctcaaaattcctcttttacactgaagacatagtcatatactcaggaggatgtcttatgttatcagttaaaaaagccacaaaatttgcagttgctaaccttattatcgtgtcaacggtttttagttctgtcacacctgcaattgcgcaatccgataaaagttctaaagatgaaagtttcgcggttggtaatactaaaaatccaaaaaatgttatctttttagttggcgatggcatgggtccatcatttaacacagcttatcgttattataaaaatgatccgcatgctaaagaaatgacccctactgcttttgattcatatttaaaaggcacaaatcgtacatattcaaatgacccaaaacagaatattactgattctgcagctggcggaacagcctttagttctggtcataagacatataatggtgccatcggtgttgacagtaacaagcagaaagtaaagacggtgcttgaacgtgcaaaagaaaaaggtaagtcgactggtcttgtttcaacagctgaattaacagatgcaacaccagcagcatatgctgcacacgtgacttctagagatgataaaaacgaaatcgctaaacaattttataaagataaaatcaacggaaagcataaagttgatgttttattaggcggcggcgctaaatatttcggtaaaagtaatggcaatttagataaaaaattcaaaaaagatggttacgaccttgccacgaacagtaaggagttatcaaaatctgataaagataaagttcttggtttgtttgcagataaaaatatgccacttgcaatagatgcttctaaagacgaaccatcattagctgatatgcaacaaagtgcacttagtaagcttgagcgcaataaaaaaggattctttttaatggtcgaaggtgcttctatagataaatcagcgcattccaacgatattacaggcgttatgtctgaaatggaaggttttgaaaaagcattcgatgacgccattcaatatgctaagaaacataaagatacacttgtcgttgcaacagcagatcactctactggtggtctaacaattggtaaagataaaggatacgaatggaatcctcaaccgattaaatctatgaaacactctggatcatatatgacagaaaaaatggctaaaggtgaagaccctgaaaaagttattaatgaaggttatggatttgaattttcacaagatgatatgaaaaaggttaaaaaagagaataaaaagctaaaaagactacttaaaaaagaaaaagacgaaaaatccgcagaagtagaaacgcaaacaaaagccctacaacacgctattcagaagccagtaaatgataaatcttatacagggtggacttccgatggacatacaggcgaggatgttaatacctacgcttacggacctagatcagaatcatttagtggtaatatcgaaaatacagaaagcgcaaaaataatatttgatatattcaagtaaagcataaaaaaattcccgagcactataacaaggtgttcgggaattttttatggtttaatttagtactcaatgttaggtgcttggttaacacgttcttggtattttttaaatgcgaagtataaaccgccaactaatgttaaaataactgctaattttttcatcattcaaactcctttctaagatgtgttgaaactgagttcaattaaattatatgtttttattatacactttttgacatattttttaaatttaagaatgcgaagatttttaacatttctgatgctagctttctttttcatctttcaaatgcttaataaaatcaaagccaggtcgccctttagccaatgcttccatcacatcataccaatccgaaccgacttgttgatatatattttgcaataattcatcttgcgccttgttcaattcagcaatgagttgatcgcctttatccgtcgaatataattttttgacacgtcgatcagtctctaaaactttttcaataatgagaccttgctcttttaatttttgaagtgttgcatgtgatccttgtttagaaatttctaatatttctagtaatgatttaatagtaataccaggtaatttattgataaaaaacaaaaaacgatgatgctgacgactcataccatacttctctataatttcatcagcggtagtaataaaggttttatatgcaaaataaaacaacatatgctcataatcgtttttattggtcgacatgatgatgactcctttcaaagcgttaacctcattataataaaatttataatgtaagtcatacaaatgatgataaaactataagctaaatctaagtttcacgagaaacatttttgtgtatcagcaaattgcgccaatcatattaatacaaaaataatttaaacacttagaaatgttagtcgtgcgtaaatagtttgtatctctcactctgtgtatttaatgcagccacatattttccaagaaataattaatcattcaccatccatgttatagcacgcttaatcgcttgatcccaatatgcataatcatgatctcctggtccatcttcaaattgataaggaacatttatgcgtgataaataatcgataaaatctaagttgtcttgatataaaaagtcttgtttaccacacataatgagcaattttggaatttgtttatcttcagctacagctttgtctagcaagtaatacggatcatgttcagttcctttaacacttgaaagattgccaattatggcctcttttgaaaaatcattccactctagatccattaaattttgcgcttcaaacacagcagataatggtacagctttggcaaatttatccccttgtgttaatgcaaatttaattgtgccatatcctcccatagagtgacctgctataaaattgtcatcacgctttttggaaagtggaaatatttgatgaacataatcatacacttccaaaatataatcataatagctatgaccatatgccatgttagcatatgcgctatgatccacattgggcataatcacagctaatttgtgttcattcgcatacctttctatgcttgtatatctcatatatgtcgtttcatcacttgataatccatgtaacaacattaaagtttttaatggtttaacagttgtatcgctattaaagaagctttgatcttccggtaaaatgactgtcaaattttgatgcataccaattgttggtgaatgatagtttaatgaaatataagccatacgtcatgacccctttctaattctactttatcaacattttacgcttaatcaattcactttaaaatcattttcaacaaaaaaaccgaatacaaatgtattcggcctaaaaaagtatttacgctttttctttatgatcttgcttgcgttttctaaacaatagtaatgatcctaataatgccatcattgcaccaaataaagttgcatttgtgttttcgctcttatctcctgtttctggtaaagcatcagttttgtgttgttttgataccttattagaatggtttacttcacctttaggatttgatggtgctttctgttcattatttggtggtgtaactcttgaatcggagtcactatctgagtctgagtcgctatctgaatccgagtcgctatccgagtctgagtcgctatctgagtctgaatcgctgtctgagtctgagtcgctatccgagtctgagtcgctgtctgaatctgaatcactgtctgaatccgaatcgctatctgaatctgaatcgctatccgagtctgagtcgctgtctgaatctgaatcgctgtctgagtccgaatcgctatctgaatctgagtcgctgtctgagtctgaatcgctatctgaatctgagtcgctatctgagtctgagtcgctgtctgagtctgagtcgctgtctgagtctgaatcgctatctgaatctgagtcgctgtctgagtctgagtcgctatctgagtctgagtcgctgtctgaatctgagtcgctgtctgaatctgaatcgctgtctgagtctgaatcgctatctgagtctgaatcgctatctgagtctgaatcactgtctgagtccgagtcactgtctgaatctgactcactatctgattctgagtcgctatctgattctgagtcgctgtctgaatctgaatcactgtctgaatccgaatcgctatctgattctgagtcgctatctgaacctgagtcgctgtctgagcctgagtcactgtctgaatccgaatccggatccgggtctgggcttggttccggttctgggtctggacttggttctggatctggcgttggttctggttctgggtctggacttggttctgggtcaaccggcggccctggagttgggtctttcggatttactgctgaatcaccatcagcacttccaccaccataacgtacaacattctcattattccaaccgaaaatactgtagtctctatttgttacaggatcaacattttcttgaataacctgagtttttaagttcttacctgtattgtcgtaatgcccttctactaatactacatatgttttagtaatatcaccaaatttaatactagctacatttggatgctcataatagattctatttttaaattggtctgttacttctttaaggttagagtcatttggatctgcatagtagctatctgataatttagatgtatcattcacttcaaaaattctcagttttgtatctgtagcacttactttaccgctactttcttcgattttatcttggtagcctttaatatacacccacgtattacctaaaactcgttgcttagggttaacaaatactgtttgcttgtatgtgttttgacctgaagctgtatctacaccaataatttgagaagaaatgttcgcgccatttggtttatcaattcctgcaattggcgaactatagttataagtaattttattattaaacatttcatccgcaatattaatattcgcatcatatgttcctgatttaggtgcctttgctcggtctgtaaataaaggtaatgaaaattgtccgttaatattttctttattatttacataatctgtaaagacaaatgtatacgtcttagtcaagatatcatatgttgctttagctacaacatcgccattcgtacttttaatgtctgcaattggcatcgtattatttgaattagaataatccacgtctccattaccagttaaactatctggtaacttcgctgtaaaataatcccctgatttcactttatctgtcactgtaaaatttgccgccataaatgtgttaccactttgattagggtcaaatgtagtcttttctaacttgaaattacttgccgtaactttatcatttacatttgtacctttagcatcagcagcatttactaccggttcagcaacagctaaactacgtacagctctcgttctaacacttggtttactagttccttgcgcattggaaatcgtttgtggtgatgattgtggtaaatctaatgtttgagaatttttaagctcactgtttgttgctatgctattagcatcattcgttgttttattatctacttgagaatttgcttcttgaggaacagtttgatcttgcatttttgcagcagttgcttgatttttaattgccgtcggttgaggtgtttcatttgttgaagctggctctgttgtagtggtattgctcgtttgtgtagacattggttttgttgtgctatctacattcgcactgtttgtgtttgcactaatatcagatgtatcattagccgttgtatttaattgaggtgtttctatcatattgtttttttcggaatctgcacttgcattatttttcgaagattgcgttgtatcgttcgattgttctgaagcttgtgcttgatgattgcctatcccaaatagtatagttgcccctactattactgatgtggtacctactgtaaaacgtctaatcgaatacttattctgcttattcgacaaataatcaattctttttttcaaaaatattactccatttcaatttctagattagtctaaattgtataatgaaataagaattatatcaattgcttttcgaaaaaaattacgtaaaatttgttttcttcctatttatataacttaaaattttctgttaactagcaaaaatcaatatactatttttacactattacaaattttttacttttcaaaaacttagaagttctaaatttttcatcaccttaaattttactgtaatttcaacaatcaaatttaactaacattttaaattattcatcatgctagcaaaaaaggcctaacgtataaatgtacgttagacctcatgttcaacttattcattttacattgtatattaaacacatacatcattgaataaatgtttgcttactaaccaatttttatgatctttaacaacaagtttttcatctttaagttcatgaataatatgaccagctgtttcccgggaaatcccagccatatcactcatgagttgaatagttaaaaactgtttgatttcataaaattcatcttgatcgtatcctactgtctgacatagatggcatatcaatttgataattcgatctttagcaaatttacttgttaatgccatgttatagttcatgtgttgctgctcattatcatttattaatgcaaaaagtgtcaaaaatatatcatcattagctttgcacaaaaaggccatcaattctctaggcaatccaagaactgtacaatcggttaatgctgtacacaattcgttaacctctttcggatgaaataagttactgattggaaataatacttgctctttattaaaataacgatatacatctccattttgattgtaatgttctctaataatgttaccttcaattaaaaagtaaatattgctactttcttgtggcgaaaaataaataacttggcctttcgtataatgtctgacaaaacattcactttgatatggttgtaatatactatatggtatattaatgtaatctgctaatgcctttagttcatgttctaatttattatttctacccaaaataaagttttctgtcataagttaaactccttcaaaccttgcaaagtgtcagcagacaactttttcatttgaatcaacggagaaacatatttaatgttttgtcgcgtgataaagtgctacatgtgaatgtgtgtacctttattaccaatcaaagcttcgtatgcctgctctaaattggtaatgataacttttttgttttccccactttcaacaaatcgtatcgcagcttctatttttggcaacatcgatccttccacaaacttaccttgtgccgcgtattttttcagtgttgctacatcaatatcatcgatttgttgttgattaggttcattaaagttaataaatacattttctacattcgtaagaatcattaaggtatctgcttcaatcagcgttgctaatttctcactagcaaaatctttatctataaccgcttcaacaccttcataggtattttctttttttataactggaataccgccaccaccgcatgcaatgacaatatttttaccgtctgctaaagttcgaattaactggtgttctagtatagattgaggtagtggtgacgcaactacttttctataaccacgtcctgcatcttctttaaagactgagtctggctgttctttttgtaattcttcaacttcttctttcgtataaaaaggaccaattggtttagttgggttatcaaatcgtggatcatctttatctacttccacacgtgtaacgattgtgcctacagttctatcactattcatttcagttaaaatgcgattgatttcagtttccaaccaatagcctatcataccctgtgacattgcaccacaagtatccaatggcattgccggcgttgtgtcactgttcgatttagcttgttggattaataaacttccaatttgtggaccattaccatgtgaaatgacaatacgcgctggtgaatcaaataaaggtttaaggttttgcatcgcacatctaatagctgtttgttgtgcttcagctgttgcttctgttgtctgtatcgcattaccgcctaatgcaatgacaattttctctttcatatttttgtcgctccttttaaaaaacatttatcgttcccatcaataacttaattaacccgataactgcaagtacgataataatcataaaaagaatatagtctgatttaatcaaacgtgtctgattattcttttgaacgattgtataaacaagaagagctggaatataaagtaacatcgtcaataataagtaattgatacctgctgcatatataagccatatagcataaattgaggctatgataccaatcgtccattgtttagtagttgcttgctgtcgatgctctaaagtgtatttaacttggtaaaatgcactgaacatgtaagggtataaaatagcacttgatgctagtgaaaatgcaaattgatacgcactctgtgtaaatagcatacttattaaaaataattgtactaatatattggtaataagcagtgcatttacaggtgctccatttttattttctttagcaaaccattttggaaataatccatcttttgcaacaatgaaaggtaattcaccagcaagcagtgtccatcctaaccatgcacctagtaccgaaataattaaaccaatatttacaagtgtagatccccaaccacctacaatagttgcaagcacctgtgccatacttggcgaatctaattgcgaaatatgattttgcaaaatcacgccttgagctaatacagttaataagaaatagataattaaaactgatataagtcctataaccgtggcactacctacatcttttttatttttagctctactagaaaaaattactgcaccttcgataccgataaacacccaaactgtcactagcatcgtacttttaacttggctcattgtgctcgcccaactaaatggcaatacaccctctgacgtcatactgaaaaagcctgttttaaaagtgtcaaaattgaatgcaattatcatgcatatgattacaagtaaaatcggtattaactttgcaacagtaacaatactattgataaatgctgctgtttcaacgccttttaaaatcaagaaatggacaccccagagtagtaacgaggcgacaataacacttggtaatgtgttgcctcctttaaaaatcgggaaaaagttacctactgctgacatcaatagtgttgcataggcaacattgcctaaaaacgctgagaaccaatatccccaagcactgataaatcctacaaaatcgccaaatcctgcttgagcataactataaataccaccgtctagctccggccgttcattggttaaattttgaaatacgaacgctaatgaaatcattcctatagctgtaataatccaaccaataataatggctaatccaccggctttaccgcccatatcagacattatattgaacgcaccgccaccaatcatggatcctataactagtccaattaaagaagatttactgagtttgttatctcctgattcgttcatattcatttctcctttaataccaatatgaggtgtctgtacatgacacttatatcatcagacacatcatattcatatcgttccatttagtgattaactccccaatgttgctgccattactgccttaattgtatgcattctattttcagcttgatcaaacacttttgaatgttcacttctaaagatttggtctgtaacttccatttcagctaatccatatttttcataaatttcttgtccataaagtgtatttgtatcatggaatgctggtaaacaatgtaagaatatcgttgaatctttacctgttaaatcaaacatctgttgattcacttgatagtcttttaataaattaatacgttgttcaaattcactttcttcacccatcgatacccaaacatctgtatatatagcatctgtattttcaactgcttctgcaatattatccgtaatcatgactgaaccaccatattgactcgctttttcttttgcaatatcaacatatgcctcttttggatttaatgatttaggtgtacaaattcttacattaacacctaacatagcacctgctaccattaatgaatgcgcaatattattacgtccatctccaacgtaagttaagtttattccttctagatatccaaaattctcttttattgtcataaaatcagctaacatttgtgtaggatgccaatcgtctgttaatccattccacaccggtacaccagagaacttcgctaaatcttcaacagcttgttgtgaaaaaccacggaattcaataccatcgaacattctacctaatactttcgcagtatcctctacagattcttttttgcctaattgaatatcattttttcctaaaaattctggatgcgcacctaaatcaatagacgcaactgtaaacgcagcacgcgttctcgtcgaattcttttcgaatagtagtgcaatattttttccagataagtagtgatgcttaataccgtttttcttatactcttttaatgtaattgcaaaatcaataagtccttcgaattctgctttggtaaaatcactttcttttaataatgatctgccttttaaatcatacggtttttgaatttctgtcattattttcaccctcgtttctataatttattacgttaaatgtcctctctgaataatggttgactcatacatctagggcccccacgtccacgtaccaactcgctaccagatatttcaatgactttaatgcctttttgtctcaataaatcattcgatacatagtttctatcgtaagtcactacaacgcctggtcttatacataatgtatttgagccatcattccattgctctctagcaccatcaatgacatcaccatttcctgttggaatgaattggatatcatctatacctagtacgtcttctaaagtatcttttaaatgactagattgtttgatggcaatatctttatttacgtcatcatattcaataataaatatattcatattgccttctgcctttaaaatggctgaatgcattgtaaatttgtcataatctatcattgtaaatactgtatctaagtgcataaaagttcgactagttggaatttcaattgctactacttttttaaacgtcgcctgcggattttcaaaaatacgtcgcgctaacttttcaatagcttgtgcagatgtacgttctgaaacgcctatagccaagacatctttagataaaacaagttcatcgccgccttcaatattgaatgggcaatctcgatctaaccagattggaatattcgcatctttaaatctaggatgatgctttacaatatattgaataaatattgattctcgtcgtcgtgctctccagaacatccgattgattgttataccgtgtcctattgaggcttgtggatctctagtaaaataaaggtttggcattggatctaaatagaatggatacttatcatccatatactctactagatgtgtacatttcggattaatttcttccttacgtacccctgacattattttatctacaagttcttgattagaaagtgtcgcaaataatgccttaatttcttcttcatgacctaatattgtttttttagactctgctaatacatcatcaataaattcacttcttacttgaggattttcaatactttcagctgctaacttctcaaggtaaagtacttcaacaccctcttctcttagcacctgcgcaaaatggtcatgctctttttgagctacttctaaatatggaatatcatcaaatagtaatccatctaaataatcaggtactaaattttctaattcttttccaggacgcttaagtaacacagtttttaaagctccaatttcgctatttactttaattggaccatctgtcatgtctatttcctccttttatctttgaattcatttagagtatagacaatcttcaaacgcttacatgtgattatattcacataaagaaagtcgaaaatttcatatctttttgttatacaatacataataatggatttttatacataaataaaggtattttgggtcaaaatatacattttttattcaaaaatacccataaaaacatgttgtataaagttttttatacagtcaattgaatgactatgaattctttctttccataaaaaaacgcgtacacaagttaatatttggtaactaacttgagtacacgtgatacgaaacaaatttttattattcatttgatacatgtctatttaaataattttgcatatacgtattctgccatatcatttgaggcagttaagattaatgtagtgtcatttccactcaccgtacctaatatctcttctatatttagctgatcgataaaatagtttatgccttgggcgaaaccaggtgaggttttgacgataatgtatgaaccattgatgattgaacttagaacttcatgttcacaatagtgtctaaacttttctctcatctcttgttctgtttgattattaatagctttataaatccatgtctcacaatcgatagggacacgatatatatttagttccttcaagtctttagcaattgttgttgcactatatcttacaccaaaatattcttcaatatatgaaatgatttgttcttttttataaatcttatgctttttaactattgtagaaacaatttctaatcgtttacttttcttcatattgtaaactcctttggtagttacgtttcttgtattaaaaaataaattcatgcatgtttcatttataatttaacactttgttttgcaaaagataataaaaatacatgtaaattttttgtgacaacttttaaaatgaattttgtattctaagtcagcatttaattatcacatatctactacttgtaatgattttagactgccgagtagtctttcggcagacaaccctcacactcctctcatctaattacaaagagagggtatacctacaaagtcaattatcaatgtaggtataccccatatataagctgtatttaaaatttaattatttataagtgtttaacattacttcttcttgtttatatatttttactccacgcctacttcattccatgcttcatacacctgttcagctgtttgctcgtcatataaatctttagccgcttggtataatgcatctttacaatctttgaagtttgaattacttgttaagtattccgttaatgctcggtagtaaatttgttctgatttagatttccctattgcttgaatcacgttataagctgctttatttggaattccagaattcgtatgtacgccaccattatctttttcagtgaatacatagtctttcatatgagctggttgaccaaattgttctgggtttgacatgctgcgtaaagcgtctccctcttttccaggtgtgtagacatcttcacccattaagaaatcctcgtcatctacaaagtatccaaaaacatctgaaaagctttcatttagagcgcctgactggtccttatattctaagttcgctgtctcttgtgtcacaccgtgtgttaattcgtgtgctactacgtcatttgcacccgataaacttgtgaatgtgcgaccatcaccatcaccatagatcattttgtcaccgatccatgcggcattatttctgttatcttgaccaccgtagttattaacatgcgttaatgaaacaattggactaccttggttgtcatatgattcacgaccaaatgtgtctttgtaataatcatatgtttgtttagcgtaataatttgcatctacgccagcacgttgctcatcttttacgaagttttcatcttcattagtaatcaatgttgcttgacctgtttgatcattaaagctaaatgctgataatttaccttgatgcgttaaatcttctaggctaaatccaccgtcaatactattgatattgatatcttttgtatcgccaagtacaccttttcctttaccagtttctgcagcttctttaactaagttcattttttctaaaatttcgccagtttgagcatcaattttaactttccaatgtgaaatttctggtgtcactgtaattaactcaacattataaacgtatttattactgtcaccatcgatttcaactttgttttctttaatgactttatctttaagatttttcgctttattcttatcaatcttaactgctttaaatgctttgtcggctgcgtcatctttacttaatgtcactttattcgttggctttactttcttcgcatcagtatccccattgattaaaacgacttttcctgatttgtctgcgtgtactttcacttctttgtcaggtgcatgaacaccatcaacactcggttgcaatgtataatgcgtaaatccttttttatcagtttttacatcagtaacagcgtaatcttgataaatattttttacattttcggatttaggcaattcttttaatgctttgaccgcatcactcttttgagtcacctcaaatttaatatcagaattagctggtttattttttgaatcaatcgctaatgctgctggtgataaagtgctcaacaaggttaatgctgccatacttgtaaatgcatatcttgaaaatttcctcacatttcattcctcctgaaatcttaaaaacagcttataaataaaatattaatttaatttttcagaaaagtaaatgattatttctatttatttctatactttttgttcgttgattttatttattgattcttttcttttttaaaaatgttatctgtagctaaataaaattttaaaaattgagcttaattatattttaaaatttatcaaggctttatttttgtgaaaatattaacaaatacaaaatagtgctctatatacttaatcaatgcttgaaatatgtgagataactatttaaataatcataatcaaataaacatttttatcaatttcaaacaactatgtaagacgcaataatcgttattatttaataaaaaagactagaatgcggtatcactcctcacactctagccttaatatgccattattttatttacttgttttgtatggtgtatgtccaactgttacttcgacaactctattatgatcaacgacaaaccagatgcctaatgtctttttagcattttgatagtaaaaaataccgctatcagcttcctttgttttaccattttcttttttcaagtccttgccataagctttttggatatcttttaatgaaatattatttttaactacaaattgcaattgacttgcttcgtttccttttgcagaaacacctttaaaagtttgatcatatttctctactttttttatcgtattcgttttagctaatttaataccattgaatttcacattatcatacttaatcgcgttaataaaattcttatccagaataaaattagcattattaccaatataaccattataagtataatatggggttattgctgcctgtgcctgtttacttgttggcgccgaattttcaacaactgttactccaatcagtgtgcccaatgctaatgttgctgctacacaaactttactggttttattcataattatctctcttttccatacaaatattttattccttacacttttattataactttttcagccataaaaatactaatgattatatttataaatacataacagttttgttatactaattgaagtacacaaaaaacaatgaaaatattaatatcgcctacttttctaatatttattttttaaaatgattatggcaatattgaaataaattatttagcttcacgtatcaactacttttcattaacatggaggcgttatatttgaaaaaacttcttattaccatcgtaattatcgtattaatcggagcacttgggttcgcaatttatgctgcaataaatcattctacatcatcaagtaataaccaagaacaagaaaataaatctacgcataaaaagacagaaaccgaagaaaatgatcaacaagatgatagtgcagacaaaacagataaaaatcaaaataatggcaataacgttactaatgacaatcaaccatcttcaccgtcaaatgttcctaacaaccattcaacagtaccatcgaatacgcaaccagctcagccaaaagactcaaattcaaataaaaataatactcacggtggtggcagtcaatcgtcaacaaacaaccaaaataatcaacaacagaacacaccacctgctaataaatcaaataataccaatacgccttctaaacaaacacctcaagcacaatcacctaaaaattaatcatttgcctgatacgtccacaagtaccagatgcataaattcagaaaaacagcagtgagatatttttctatttgaaatatcttactgctgttctttatttgcataattcgcactctgttaaaatcatataaaagttcgctttaatgtcattgacgtatgtataagctctcatgtttaataatattaatacacccttaaaaacgcttacacgaaaaatttagaaaggaggtacatgttaaatgcttgatagacacttaaaactactccagttttttattaaaaatccatcaaagcacattagttctaatgaaattgctaaacatgtcaatgtttcaaaccgcacagttcgcaatgatatccatgttatcaatagcaattttatggatgatatcatcgtaagtattaaatctaaaggatatcaattaaatacatctcagtataccttagaaacgataactgaacgttacacgcatattcaatcatataaagaaaaactattattatctatggcgtatcaactgctaatgcacaataaatcgcagacattgcaacaactagagcaagattatctattatctaaaactgtgctcaacgactatttcgttcgaattcaacaatggtgtcaaaaatttaatatcgctttaacaatcaagaaaaaacaaggtattgtggtcgatggaacagataatgatatcactaatgccatcatccatttaaatcaattatcatcagggcatgtacatgttgaagacctaattttaaatgaattacctgattcacaccaaaggatgatttcgcatattatacaagagacacttcaacaacatagtattgaaacaactgatattcaaatacaacagcttttaattcatctcattttaatcattaaacgtaagcaatctttaagtgagctagacacgttaaaccacgattcaaaattgatatctcaatcttgcattaagcaaatcaacgaaagattaggttatgacttgaacgaaaaagtaatcaatatgttttcattctttattgcttatcattttaataaactcgatattggcatagaacgtatatttatacaaagttatattgatcgcttaatcgaattgatgcagcaacgtattcatgtacctttcaatgaagattcgattttacaacaaaatttatataatcattttagtaaagcatatttacgtatcactcaaaacatttatttaaacaatcctttagttatagagattaaaaaactctatccctttgtgtttaacacactttttgaagcgattgataaattagcaattgatactgatatagagatgagcgaagatgaaattgcatttttaacaattcattttcaagctgccatcgagcgtcgtaccaaaacacaattaaatgtagtcattgcttgttattatggtctaggtgtgtcgaattttttagaaactaaaataaataacttatccgaagagttgtcagtgataaatacgattaaactagaaaatataacacactatcactttgacaatgtagatttattaataacgacccatgatattcctaaacaaacgctaaacatacttcctaagcacctgacgactatcaaggttgcaccattattttctgaagatgatcgtcacaaaatcagacacgttgtgaagcaaaagcaaaatccggttcaagcacatcatcatatggacactgtcaatttccttgtcgtaaatactgaacaaaaatcacggcatactgtgcaaatttttgaagaagctcaaaaaatattacaagcacatcatgcgattgtagaaggatatatcgaatcagctttagagcgtgagaaatcatcttctacatacataggtaattttatggcgattcctcatggagatcctgaaaaagttttacaatcacatgtgcttatttttcgcacaaaagatgtttttccttggcgacaacacgatgtcaaacttgtctttttcttagcgatttcgcataaagacaaagcttttacaaaacaaatgatgcaattaattgctaacttggatgatgattcagtgaaccatttatgtagtttagatgatcatagtttaaagcaacagttatttgaatacttacaagaataattgccactagtaacggtaattattcttttttttagtatcgagaatacgcttacaatatagaaaaggagatgattttatgaaaattgtagctattacctcatgcccaaatggcattgcacatacatatatggctcaagaaaagcttgagcaggtagcaaaagaaatgggtgtggatattaaagtagagacacagggcggtgttggtgctgaaaatgttttaactacgcaagacatcgaagaagctgacggtgtcataattgcagctgataaacaagttgatctgtcccgatttgttggtaaacggttgattaatgaaaatgttcgcgaagggattcataatccgagaggtctaattcaacgtatcattaatcaagatgcgcctatttatcaatctgaaacaaattatcattcgaaagatcgcggtaagtctaaaaatggtattcaaatggtgtatcaacatttaatgaacggtgtatcgtttatggttccttttatcgtagttggtggactccttatcgccatcgcgctgactctaggcggtgaaacgacatcaaaaggattagtcatcccagatgattcattttggaaatccattgaaaacattggtagtttagcctttaaatttatggttccaatactagctggatatatcgctgttagtatcgctgacaagcccggtcttgttcctggtatgattggcggcgctatcgctgctgacggtagtttttatggcagtgatgcaggcgcaggatttttaggtggtattgttgctggtttcttagcaggttatatcgcaaagtggattaaagatattaaagttccaaaagcaatggcaccaattatgcctatcattattattcccattatttcatcggtcgttgtaggattgatatttatatttttaatcggtgcaccaatttctaatatttttgaggcattaacaacctggttaaaaagtatgcaaggtgctaatattattatacttgcgatgattataggtgcgatgattgccttcgatatgggcggtccagtaaacaaggtagcatttttatttggctcagcacttattgctgaaggtaattacgccgttatgggtatggtcgcagttgctgtatgtacaccaccaatcggtttaggtttagcaacgtttgttcaaaagtataaattcaatcattccgaaagagaaatgggtaaggcttccttcactatgggactatttggtattactgaaggtgctattcctttcgcagcccaagatccattgcgcattatacctgcaaacatcattggtgcaatgattgcatcagtcattgcagccattggtggtgtcggcgatagagtcgcacatggaggtccaatcgtggctgtattaggtggtattgatcatgtattatggtttatctttgcagtgatagtaggtagtcttgtcacaatgactactgtactattattaaaacgcaatacaccagttatagcagtagatgcaccagcgcaacacacgcaacttcatgatacagatattacacaacatgatacagaggttgacaatgtagataacaccgcgaaacattcacatctcaataaaccttctcatgtttttgatcaacaaactatgataattactgatcacgacatgtctcgaaacgaagcaattgatatgttgattcataaacttaaaatttgccgttatgtagagcacacatcgcatttaaaaaatgcaatactagaacgtgaaatggagtctacgacagctattggcatgaacgtggccattccacatgcaaagtctgatgttgtaaaacaaccgattgtagctgttatgaaaaataatcatggtgttaaatgggacagtctagatggtagtctacctcaattgatattcttaattgccgtaccaaacaacagtcaggatacacatttaaaaatacttcagcgcttatctaaagcgttaatgaatgatgagacacgccaatcactaattaatgcaaacagtactacagaaatttataacttattaatgaaaatatagaggagttttaactatggcattatttttacaacccgtttttaaagacagaatttggggcggtcatgcattaaaagcatttaactatgatatccctaatgaaacaactggtgaatgctgggcaatttctgcacatccaaatggtcctaatacaattatcaatggtccatacaaggatatgaccctagatcaactttggtcacaacatcgtgaattattcgataatgattcacgagatagtttccctctgctaactaaagtattagatgccaatgataaattatctgttcaagttcacccagatgatgactacgctttaaaacacgaaggcgaactaggtaaaacagaatgttggtatattttagatgcagccccaggtgctgaaattatatatggcgtacatgcacataataaacagacgttaatagacatgattgataatcatgaatttgacagtcttttcaaacgtatacctgttaagcccggtgacttttattatgttcctgctggcactgtccatgccattggttcgggtattttaattttagagacacaacaatcctccgatacgacataccgtatttatgactatgatagacgagatcaaaatggtcaattgcgtgatttgcacttagagcaaagtaaagatgtgattgaattaggcaatcatgaaccaaatactactcctataacaactcacatcgacacacacactgtaactcaatttgtagataatcaatattttgcagtatataaatgggatattcatggagatttaaaattcaataaaccacatgcttattgcttagttacaattatcgatggtactggtactttaacagtaaacgataagcactatgacatccaaaaaggttctagctttattttaactacggaagacgaggatattcactttgtcggtaatattagtgctatagtaagtcatcctggataatagcaatgataacaaccgtcccataaaagacagaaattactatctcttctgtctaaaaacataaaaatccacacattaaggagctataaccctaatgtgtggatttaatttttattctgtaacgttactttggtcaactttttcagatacgcgcttcatcaatggatctgttacaggttttaaaattaaacctacaacgaagaatcctataccaaataacgttaatataattaattttgtaattaggatttccggaacaataccgcctactgtttcacgtaatgaatcaattgcatacgtaaatggtaagtatggcgaaatgttttggaaaaattgtggcgtagtttgaattgggaatgttcccccaccacctgcaatttgtaatacaagcaatacgattgcaatggctttacctgggttaccaagtaatgatacgcacgtatatacgattgagttgaaaataatcgaacagaaaatcgttataagtacaaataatacaggtgactcaactcctgcttttaggattaacaaatctccaaccgatacaatgagtgcttgcaacataccaagcattataaagaatcctgccttacctaagaacacttgtcttgtcgttaagactgactctagactcttatgtttattatcaaccgttaataaacttaccatcaagagtgcacctacccatactgacagtgcagtatagaatggtgtcatacctgaaccataatccttaactgggaaaacatcaacagtcttcttattaataggatttgcaataatacccgcttgctttttcaaatcattcttaagtgtgtcgattaatttgtcgactgcatcatctttgtctaatttcttgaaaattttattcgcttttttcaaatctttttcaacatcaggcaatttattttgagaaaaatcagctaaatctgataaagcctttttcgcttgtggctgatttttatttagtaatcctaccgcttgatcataaccatttaataacgttggtaaatttttattcacacttgctgtcgcattagttaatcgctgttctaactgtggtaagtcattgcgcacaaagttagcagctttagctacatcacttttcactttcgagaagtttgcttgagcatttttaacagcactaatgtattgttgttcaatacttggtaatactgtttgtaagcgatcaatacgtgttttaccattttttaaaatagcttgtccactgttaatgacttgatcaattgtatttaatttagactgaacattggataatgcagtttgccctttgttcaattcatccataatacgttgtgatattgatactaaagagctgttaagatcttttttaacataatctctaaatgatgataatgatgaatctagttttgaaagttgatctagtaatttagtagcttcagcagttcctgaactaccattctttaatgcattgcttaattgattaactaaccttaatgattcattaattcgattattagctgcttttaccttatcaatttcttttgataaatcaacattttcattcttctcaatctcttttaatgtatcgataaattgttgattatattgcgttgtgtattctaaaccggacttaacattatctaaagactctctaaaatcagaaggcttgtccgatgctaaaatcccatacgaaatattacgtaatgcctgactatctttttgtgcggctttcgcttgggtatctaaattatttgataatgataataaagagcccgttaatgccgcttccattgatttaacatctttatctgtaatgttttgtgtgttctcgttagctgtgctgacttgtgttgttgttatatctacaaaactttgaccatcttttttcccgcttgtactttgtggtgtagtcgatacaggcgcattattactatttggtgcggtattttgcgtaacattattatttggtgcagtatcgccacttggtgcacttggtggcgttgatgctacaccattaccagctgcaggtgcactatttgatgtttcgttgttcgccgcgctattttgaggaatctgttgctggtttcttcgatttaaatcttgcgcgcgtcgaattgcatcttgataatcaccgactctacttctaacttgtgtgacgaagcctttggcatcatttaactgtccattagcttgatcaataccttgactcgcaatgttaagtccttgattaattttagggaactgcgctggcacgtcatcagctgcaaaatttaacgctttttcaattttcggcatataattatttaaagctaatatcaacttagccttttcattaagttgcggaatagcaccattgacttcgtttaattttttctgagcatctaaaatatcacctttataatttcctagttttctaaaatcattggcatatttatctaaatccgcttggtggttattcaaatatacaattttattcgcaaagtcattaatcttaggtaaagctttatctgctgaatataccgcattttttatcttgttaattgtcggcacattttcttcaatagttaaacctgctttgttagcttcttctaataatgctcgagttactgttttattaaattgttcattcgctttttcaacgacaactgacgaaccagtatctgttagcttagacgcaacagcgttaatcttctgattcaccttaaattctacatctgctttttgaggctgcttacgtagtgtccctgtaatttcatgtgtaaacttagatgggatgtaaatacctgcaaaatatttacccatttttatctcatgatcagctttctctctacttacaaactgccaatcaaaacttttatttttcttgagtgtattaaccatcgtattaccgacattaacttttttccctctgattgtgtcgcctttatcttcattaacgactgcgaccttgatgtgtcccgtgttgccatatggatcccacattgcccataagttaaaccaagcgtagaacgatggcaaaatagctaagcctgctaagataatccacacagctggcgtcttagctactttcttcagatccattttaaataatttaaatgcgttcttcattgtcacactcctatgtaggaattattcatattttttatatattttttgtaaattaatttatttttgcgttgtgaattagtataatcaatttactggaagatatttagtcgattgatacctatcaactattttcagcatacgataaattataacaaatcatagtttattatcacacttaattattatatttttcaagggagaatacgaaatatgcctaaaaataaaattttaatttatttgctatcaactacgctcgtattacctactttagtttcacctaccgcttatgctgatacacctcaaaaagatactacagctaagacaacatctcatgattcaaaaaaatctaatgacgatgaaacttctaaggatactacaagtaaagatattgataaagcagacaaaaataatacaagtaaccaagacaataacgacaaaaaatttaaaactatagacgacagcacttcagactctaacaatatcattgattttatttataagaatttaccacaaaccaatataaaccaattgctaaccaaaaataaatacgatgataattactcattaacaactttaatccaaaacttattcaatttaaattcggatatttctgattacgaacaacctcgtaatggcgaaaagtcaacaaatgattcgaataaaaacagtgacaatagcatcaaaaatgacactgatacgcaatcatctaaacaagataaagcagacaatcaaaaagcacctaaatcaaacaatacaaaaccaagtacatctaataagcaaccaaattcgccaaagccaacacaacctaatcaatcaaatagtcaaccagcaagtgacgataaagcaaatcaaaaatcttcatcgaaagataatcaatcaatgtcagattcggctttagactctattttggatcaatacagtgaagatgcaaagaaaacacaaaaagattatgcatctcaatctaaaaaagacaaaaatgaaaaatctaatacaaagaatccacagttaccaacacaagatgaattgaaacataaatctaaacctgctcaatcattcaataacgatgttaatcaaaaggatacacgtgcaacatcattattcgaaacagatcctagtatatctaacaatgatgatagcggacaatttaacgttgttgactcaaaagatacacgtcaatttgtcaaatcaattgctaaagatgcacatcgcattggtcaagataacgatatttatgcgtctgtcatgattgcccaagcaatcttagaatctgactcaggtcgtagtgctttagctaagtcaccaaaccataatttattcggtatcaaaggtgcttttgaagggaattctgttccttttaacacattagaagctgatggtaatcaattgtatagtattaatgctggattccgaaaatatccaagcacgaaagaatcactaaaagattactctgaccttattaaaaatggtattgatggcaatcgaacaatttataaaccaacatggaaatcggaagccgattcttataaagatgcaacatcacacttatctaaaacatatgctacagatccaaactatgctaagaaattaaacagtattattaaacactatcaattaactcagtttgacgatgaacgcatgccagatttagataaatatgaacgttctatcaaggattatgatgattcatcagatgaattcaaacctttccgtgaggtatctgatagtatgccatatccacatggccaatgtacttggtacgtatataaccgtatgaaacaatttggtacatctatctcaggtgatttaggtgatgcacataattggaataatcgagctcaataccgtgattatcaagtaagtcatacaccaaaacgtcatgctgctgttgtatttgaggctggacaatttggtgcagatcaacattacggtcatgtagcatttgttgaaaaagttaacagtgatggttctatcgttatttcagaatccaatgttaaaggattaggtatcatttctcatagaactatcaacgcagctgccgctgaagaattatcatatattacaggtaaataagtattatattaaacccgtaaaatttataagtataaacaaggagttcggacttaaacatatttctgttcataagtccgatttcttattcaattaaacccgaggcattcagttcgaacgcctcgggtcgttttatataaatatattattttatgttcaaatgttcctcatcatatccgtttcaattgccatctcacacattttataaatatgagcaaatgtacttattctcaaacattactgccgagctttaattgacgttatattaactataaactacttttccatgactctacggattcaatgtcacatgagcgtgataaaatttgttcaataataaagtcatgtttatcatctgatctatcaccaacagcatcttctaaaacagtaatataatagtctttatctacactttctaatgccgtgctcaatacagctccacttgtagagacacccgttaatactaaatgattaatatcatttgcacgtaaataaacttccaagtaactacctgtaaatgcgctaaagcgtcgcttagaaataatcggctcatcttctagtggtgctaaatcttcaagtattcgtgtagatgcatctgcttcagtaatcgcatatccttgagctttaattgttgaaaacactttattactcgaggagacatcattaaaatgcttatctaacactaaacgtatgaaaatgactggtattcgatgttgtcttgctgcttcaattgctctctgattcgctttaataatattttttattctaggtacactactcgctataccttcttgcatatccaaaactaatagcgccgtttttcgagacatcttcattctcctttacttgtgtagttctaagtcgttaaattcattataacgttaaaatgatggacaatctattcattgcattttgcatatacttcacaataaattaaggggaaataagacgtcttatatacttaaaaaaatatatagatgctcttcccccaatataattatgctttatttttcaacttattgcgtcgtgataaccaaatcattagtacacccattgcaccaacaattacagatatcggcaaccaatgttcttttatcgtttcccccgctttaggcaaagatacattaccatcagcatttaataatccacttaacaatccattacctttaccaagtgttaacgtcttttctggctttggtgtgggtatatctggaatactgtctaataaatctgatccttgattcattaaatttgctaacttatttaaatctgtcgttttcccatttttattcaatcgatctagtaaacttggacgatttactattggtgataaaatataatctatatcttttttcgtttgattgagtctcttttgtaaattcaataaatcatccgctttaccattcaatgccgatttaactaaattaaaaattttattttgatctgtttctattttagtaattaaatctgccagtaattttgccttttgtctttctatacgtgttgctaaaatcgtttcaattgcttgttttttatctttggcattattcaaaattgcttttaatatatcatctgaagacgtgtcgccagttgatgcaaaatgtttcttcaattggtcaacgatttggcgatttgataatcctttattcgtccaatctttagccaatttatctgcttcagcttttcctaatttcgtttgtaaaatttgagaaatcaatagcgacttatcttgtgattgatcaatcaatgacgttaataaatcatcactcgttgtcagagataattgatcaatatgacgagtaatttgatctgcaatttgttgatctgttttaccatcaacacgtatatcttttagaattttaactgcctcgtctttattaaatatactttctaaaatgctttgtgtagcatactttttatcatcagtacgtgcaagttcttccaaaataatatttcgttgactttttatacgctctttcgtcttatttacttcgctcattaagtctgatttttgatttttaggaagttgcgtatttgcaatacgttgatctaaagattgtaacgtattcagtttatgatatgtgtaatgttgcgttgaggcattacttttagctaatttttcaatcatagcatgattaattttatcgcttccttgtaatttatcagtgagtcgattactatggctttgattctcttcatttgaaaggaatttatttaacacaacatgtccagaaccatcattatttggcgttttagctacttcatgattattatctgttgtagacactgctggatcttccgatgtatctttcgatgcatctttcgatttgtgtatttgctgattcaaatggtctaggtcttctaacgccttatttaccattgcttcatcatttttatcatctttttctccatgttttgttgtagccgtttgtgacatatcatttttcattgcattaagatcgtcctcgccactttgttgacccctatcaacatttgaagaaacctcatttaaatctttaagcaattgatctaatttactgtctatatcactttgaccgttcatttcagtgtgagaacttttattgtctttgctatccaactcattagctcgttttatgatttcatctatttgcgatgctgttttcgcttcatttagttgtgctttataatgttctttagatgaagccgataactgttttaattgctcaatttgacgaattgccttgtcaactttgtctaataaatcttgcttagataatatctcttttgtaatttcagtatccttttcagatgcagcttgggcatcgtacggcaagatattcgttaaaatgatacttgtcgccatcattgtcgaacacgataactttacatataattgaaacggtttccctcgatatttagccatcaacatactccttcctcacttacttccttcaaagaattacatactattatatacctgtttacaagaaatttacacttatctatctagttattgttgttagtaattatctacttattacttagcttatatttaagtaaacaaaacaagcatgacgtaatatcatattgtccatgtcgctaacatcatattacgtcaaatcttttatattaaatgatgttttattttagactgctttttccttttagctttcgagcgcctgtttaaaaacttgctcgaattgttcacgcgagatttcgtgtgcatgtgctttttgtgctaataaagcatctcgaaactgttgttgatctttcaaactttctaacatttgtattaattggtctttactttccattgttatctcatcattatgctcaaataagtgctctgataatgttactttagcatggtgtgcggtttgacgataacctaaaatcaacaactcatagtcaaacgcttgttccaccgcatttaaaatttcattaccctcattgatatcaagataaatatcacataactggtatagttcatttaccctgtcaatattaatagatgggtataaatgcacattagcatattgatcaagttgcattagcttatcagacatctctgtaatagcagcgatgtgaaacttaaaatctggtaaagtttcaaccaataccttgatgttacgaagttgatccgagttagttaatattacaatttctttagtatatctattacgactacgatagttatatagatatccgccttgtaaaatacgagattgaacctttgcgtctgctatattgagcatcgtttcatattcgtttttatctggaataataatattacaatgtcgtttcatatcacctttacacatcaattgcatatttcccgggacattaccattacagtgttcttgccataccaaaacatcactaccttttgatggcaaattatataacactgaaaatggtagggctagtgagttaataacgaaatgatgttccgtaatttcaagttgcttgataaaaaataatgcgaatgcgagctttgaagggaaaaagtaagacttcccttgccaatccaatatgacatcagatgttacaaaattttcataaatcacttctttaccttctgctgtcatatatttcttcaagatcgctttacgatttaaatcgtaaacagtttgtgcaaatttaataccattcttagaataataatcgacaaatcggacacgttgttggtcatcaaaccattcgacacgactaacaattctagggcgctctccactttgataaaatattttacctcgtagacgtcccatatcattaattgtagccgaattgttgttacctttaatttcccaaaaagctggtacagtaacctgattaaaaaatcgtggtttcatattttctgtattatgattatctgcaaaaaattgatacggtgatataacatcgtccggtaaaaagccattgtcattgagtacaattgttaaatcttcttccaacttactggctttaaaagactcatataactttcgtgaatgatcgttaaagtaatcaaataatttaatcatgtagcacctcttgaactaatgtttcccattttaaaataatatcttgagtcataaattgctgtgccacttcataagagatgtcatgtggtgtctggggaccattgttaaaatacattacaatggcatgagctagttttgcgataacatcatccacactatcttcgtcggtatcaaaaggtaccaagtagccattttccccatctcgaataaaggttgggttaccataattcacatttaatccaatcatacctagtcctgagcctaccgcttccattagtgttaacccaaaaccttcgctagttgatgcagaaagaaataactcataatcattataaatttcatcaagtttaacatgccctagtaaacgaatataatcttgtgcgcggtgtgtatcaataattttacgcagtcgcgtcttctcgctaccttctccataaatatcaaatgttaattctggcacttgtcgtttagccacgataaccgctttgacaagccaatcaatatgtttctcattcgctaaacgagatgcactaatcatcgcatatggctttcttgataatgttggatatgataatgcatcaatgcttcccacaggaatagtataaacacgtgggcgataaccttgatattgctcaaattgtcgacaaaccatatgattttgaatatctgttgctgtaataaagaaatcaatgtatttagcttttgaaaattgatattcataataattgttccatagtatatgctgctcactcatcatattattactataatgatcagcatgaatcacaacaccaactttactatcacctttatgctgcaaaacagcctgaccaatatcagaagcgcggtctaatatgacaatatcgtctcgggttaaattcaatcgttgtaaaaagtatgcaataaattccgttttgttatacaacaccgcatcttcaaacacatatatagagctgtctccatcaatatattcgttataagcgatggaaccatcttgattataaaattgtcgcatatataatttcgctttattatcagctggtgcataatactcagaaaatatgcgcgtataactataaaaatctttacgtactaacatactattaattacaaattctgcacgatccacaatatctttttgttcattttgcagataacatgttacaaatgatgatttcccattaaaatataggcggactatcttaccatttctttctctaaaactaatgtcatgaccaagctcacgttcaatgtcatctaacgtgtacgttgttggtgctaaagaaatatcactaaaatactgatacaaccaaataacttcttgatctttaaacccaatgttttgcgttaatgtctgtatgttctctgactgtataaaatctaaaaacacaaatttagtgtcttgatttgtacgtctcaataatttagcacggtaagcttgtgcatattcaacaccgctactcgcccagcctataccaaagtttatattatatattgtcatgcgctaccccttttcatttatggaaaatgtataactggcataccctctttatcaaatgtaatcatgctttgacaaatatttttcaccattctttttttgatatttcgtgtcataacttcaaatgaatctaaggcaactctatggtattcaaaaatagcgttacgttgcccattttgtcgttgattaacgcttgcttttaattgttgtaaatagtcgacttgttctaaccaacatgaatcaattgctttcaaaaagactttttgaacgaaaatattataataatatgcactttgcatgtttttacgattcaaagctaattgcttttcaaattgctctaataaaaatgtcactactgcttgcttatctttaaaattaacacaagccacatctttattaaattggaaacttaaattttgataaatatactcgacaacacgcgattttgttagcaccttttcctcatttacaaacatttcaaatacatctttagctaacgctttaaaatcttgattctcagcatcatctatttctaaaactcgattgcgttcctcgtatacaagatctcgctgtatactaatgcttttttcaaattcattagccatttcacgagctttaaccccttgttcttccgagatacgctgcgctttaactacaatttgcttaactttgcgattaaacaaattactttgcgataatcgttgtgcatctaatgaatataattgattattttccgctaaattactatcgctccatcgcttaactaaataatcatctagtgaaatatatatacaagatgatcccggatccccttgtctaccagaacgaccacgtaattgcctgtctacacggctattttccatatgttcatgaataataacagctaatccacctaatgcttcgacaccttcaccaagtttaatatctgtgcctcgacctgccatactagtcgcaacagtcatggaaccaatttgccctgcttcagctatcatctgcgcttcttttgcaacattttgcgcaatgagtaaattattaggaatatccatttggaataatactttcgaaaagtattcagccgcttcagcagttctcgttatgagtaaaaccggtcgccccgtttcatgaagttcaactatatcatgaatcatcgcgatgtttttctcatcaactgaacgaaacactttatctggttcatcgatacgttgaatcgctttatcagttggtacttgtacgactatttttgaatacaaatcaaagaactctgattcgcctaattttcctgtagctgtcatacctgaaaatgattcaaaaagtttaaataaattctggaaggtaattgttgccataacacttttatctgttgaaacctccataccttctttcgcttcaatagcttggtgaagtccagcttgcaacttagttcccggtaacatacgacctgtaatacggtcaattaaaacaatatcaccattatatacaaagtaatcgacattagattcaaacaaatattgtgcgcgcagtgctaaattaatattacgcactaggaccatcgcttgttcgctatataaatcttcaacattaaagtatgattgtgccgcttcaataccttgatttaacagccatatttcttttttggtcttcttcattttaaaatgcacgtcttcaatcaatgtatctacaaactctttcacaatatgaaatagatttgattgtaatcttggtgcacccgaaataactaatggtgtttgagcagcatctaaaatgattgaatccacttcatcaataataccgtaatttaattgtggtaaaaatttcccttccgcactatcagccaaattatcaattaaataatcaaaaccgagacgtccattagttgtatatataatatcatgttcatatatattacgtttttcccctttttgatactcataatccacaatatcaacaaaacctaatgaagcagttaaacctaaccattcatataatggttgcatctcttcaaaatctcgcttcgctaaataatcattcgttgtaattaaatatgttccttttcccgaaagagcatttaaatataaaggcatcgttgccgttaatgttttaccttcgcctgtttgcatctccgcaatgttaccttcatgcaatacaatcgctccgattaactgaacttctttaggatacatacctaatactctccagctcgcttcacgtgccactgcataagcttcaggtaacaatgtatctagtgtatcaactcctgatgctaaacgttctttaaattctattgtcttttgttttaacgcatcatcagaatatgatttaacttcatcgctccatgtattgatgcgtttcactatttttctaatcgactttagtcttaattcgtttatcgtaacatctagtttatgtttcatttacttccccaccattcagtttcgatacatctaagtaatctaaaaatcgtactggattcattaaacgtgacatataatttagatgtttgtcttgctcttctttaaaataaacctcgacatttgtatcttttagttcatgatttcctgggacatgttctgtaagccatccttttaaatcatcatcttcatggcttgtacgatacactttgcaacccaaatgctgagcgacataagttgcaaaaacatttgactttgacccataactaatcaaattaatagcctttagggtatcttgactttgcaaatcattctttagttgcttaatatttccctcgatattgtcgtccatccaacgttcaacgagccaaacatgaccaaacagtttcaaaaaatcattcgaaatagttggataggtgtcagatggttctgcaataatgacattgatcatatcatttccatattggtcatcgcctatcttcgtcacccgcatgcttttatactctaaatcatattgatgcgtcatctctgtgattgttaaacatctaaatataagactcgtcgatgctgcattcatcatttttattttataagcataggcttcatcaggatattgaatcgtaatactatttgactttacaatctcagtacttagttttgtgccatttttattataaaaaatgatgataaaatacactgaaccagcaggcgttgcatcaaaatcaaaatgcaatttataatgctgtcctctacgcaaaattggtaaacttggcgcacttttatattttgaaaattgctttaacatcaaccactcatgaatcggtaatccagagggcatcaaaggatttataaaagtcacttcaccatttgaaaatgatactttagagccatacataaatgtagtttgtgaaatataattccaagtaactttaaatgttttgtttttcagcatgttgaactctcccaaacttgtcttccaaaataatgttgtaaaaattaacaaaccaacttgcaatggtaggtgaatcatcattatgtcgcccaggaatactgcgattcatcactcttgcttggtgtgctgtcaatacaggtaatagctcttgaaatgcatgtggatcataatcatcatgttgcatatatgctatggcaaaaacagtttgtgacaatgatttcttttgaaatgtttgccaaaatttttgatttaatgcctgtatcgacgcttgagatgtatcaccttcattagacaccaggacgtctaatgctgtaccgaactcttctggtctaagtaatcgcatatgttcagcaatcgttccaatattaacaagtggtttaccaacaataattgcctgaggatttaactgagcaccataatacaaggcaccaaatgaacccatagataaaccagataatattaattcatgtgatttaaaattcagcttttctaatgtctcgtcaataacattgataataccttgttcatattcagatgaaccgatataaaaactaccaccttcaacacgaggatcgccgataagtaaaaacggtgcattcatacgtttcatcatataatatccttcgaaaccttccgctgttcgataaccactaaaatatacgtttagtggcggtttcatatcaccagggtggaaataataaataaattcctgtcgttgactatctacgaaacgactaccaccaagtaaaaattgacccatgtctaatctagaccatcgtttgtgtataggtcctaaatgtaccgtcccgttcccacgcgccttaacagttacacttatataagcatcaaatggtttcgcaggtatctctaaaggactgtctaacatatcatcagtcaatacgatttgttcaattaatgcaccatcagcgccagtctgaatcaatctaaatgtatattgcaactcgaccgcaccatcaatatcaaattctggccatatttgaatgactttatctttatcgtaaacgagattattttgccaagatgcgataggtttaaattctttcccaaattctccactcaatgtgagctctgaattaccttggtaaacgacatctcctttaaaattcggatgcacaagtgctaacttaggagaaaccttatctccatactgtcctgagaagctaactgcctctaatttattattacgttcttcaatattccggtaatgtaatggttgaacaacgtatttttggacattttcgtcttgttcatattcaactgaccaaaatgattcatcaacatacgtattgtatggttcgcttatcatttgtaataaattcgttaatgtctccgagtatggtgcttgaatatagataaaatcaaagcgcccttctgcttcaacaatcgcttcaatagcctctacataaccactatcaaattcaaacaatccaatatcgaagtaatcccaactcacaccttttttgtgttgaaaaataggttctaaatcgtctcctccaatttgcaaaactctaaatttacgtggcatcattttcaccttctattaactcatcgagctgattaataatattcttagaagcatatgcatctattaattttaaagaataggcgtacgcataattccaatttttcaaataaaataaataataatttaacgcatcatctaattcatcaactgtatttataatacggccattgtcataatcagagacgtaatctgtttgttgaccattaatttgtggaatcccagcgctaattgcactaatttgtaaatacaagtcaggttcttttgacatatctatcacaagtcgcaacgtccgcaatgcttctacaacatcatgttcagcatgtatcgtcttaacagcaatgatgtcatcttgatcttcaggtgtcattaatgctgaaacattaacatccgcattctgtttagcttggtattcctcatttaccgacgtaatacattcacgaagccacatcggtatgtcattttgatggcgcgataataaaattaaacggtaataatcttcctgtgcgatataatccacaagtcgttgcatcatttgttgcaaatcagcgtcactcataccatctatccatacacctataaatgtttccatcaattgactacttatattaggtgattgtctcgtttcaaatggtgtgattcgaatcattgtattctcccgctgatacttctcttgatgactaattaaatcacgttctagttgcacactatcaacaattaaatgggcattctttacgatagattgatattcctcatctgacacagtttcatttctatttttaaaaaatgaataacttaatgatttcgctggaatatgattggctatttgtcgattgtgcctagcatctgaagccacaatcacatgatcatcttcatgtatttgttgtgcaatcattgcttgaaatttttcttcaattagttgagccatattgttatattctgtttgttgatagtgatgttgatatctttttgaaacagtgactctgccatttttcaaatcttcatgaagtacacaatctccattaatcgttaaatattcttggtaagaagcctctccctgatcatcaaaataacgtatcgctgataaataacctctgtcatcaaaaatataacgccgttgtaactgatctctttcaaattcttcaaaccaaattgaatacccttcttgactaaaataaatatttgtataggtctgttcactcgtcacacattttaataaatacggtgtgtacacaaactcaacatcatccggccattttaagtgatgataattaatcgcttgtggcgcatggtgactgaatccttgaatttcatcaaacacagacgaatactttgtctcatataagtcatatcgatgtaaaaatgttcttaaatttggtgcatgattgagaacaatcagttgataatctaagtcattttcaaggtgcattcccattaaactaatcatatcgtcaaattccgtcttattttgtagttgataatacggcacagtcgtgtcttgccaccatcgttggtcatcgtaccaagctggaataaagtatttcataattacctccttaccaatactggtttaaaaatggcttatatttatcaaaatataaatatgtacgaattgtttctgcaatattaatactgatgtaaactaatacaatcagttgtactgagaaataaatttcagtagataaatgcggtacaaacaatgtgaaataaagcggtataccaataatgactgtaactaatgccaatccaaaccaacatacgcgtcgtgcttgataatttaaataacgttctgtatccttaccaggtttaactcctgaaaaataattgccactctttaagaaatctttggatttttgtttagtattgattaaaaatctcgataaaaaataacccaataacatttgaatcactaaatatactgaaatacctactggactatcaaatgtcagcattggcatgtcatctgatatgcttttattaaacatagataaaataaaatgaatgccactttttaagaaaacaaaagctgaaatactcatcattaaagtaatactgcctgcagggttaactttccaagataaataagatttcatatttgttgcggaaacgttcattaaatcgatatatggtattctcacttctactaattcaataaataataagataaacaatgtgattatcacaaggatgattaacaacgcaatcacaatatgacttgcatctatatattccattttttgatgcatcattgatttaataatactaaccattacaatcggcattggtcctgcgatgccgtagcgactatttttgtcagctaaccaaactaataacatcgttccagtaaccaaaatcaatattgttaagtaaatattgtcttgatgaacacgttctttcgaaacatattcatgaatcacaaaataactttgaataacacttaaaattaatgttaagatgcgctctttataatgcttctcaagacttgtttgtttcatgtatttatccatattccgataagaaatcagcatcaagataatcattgatgttaaccacggacctaatcctaaagtgaaaatgtttaaagtattaacgtctccacccatattagaaatagctattttaaaaaatgactcatgttttacttgcatatcgttataggaaacgatggaaatgtttgtgcctaatatataaataaacaagataaaacatgtgtatagcatacgtttatatataattttatattcgtattgttgtaaaagttttaacatgttgcacctcttttatatcaaaaacattaaaaagactaagggttcatcactaattattaaaatcctatatcgatttttctagtgattggtgcctcagtctttttaattttagccagctataaattcaatttatgcttgagaatcatcttgatcattttcatctttctttttctttctcttcattaaacctaaaccaactaataatgtcataacgccacctagtaatccattttgttttattgagtcacctgtatctggcaatcttttttcactttgtgctggtgtgccattatgtttagtcacttcagatgttgcacttaatgtagactgagattcactcgtgctcgttgttgcttcacttgataagcgagatgtgctcgtgctgtgagtatgatgcatactcattgagtctgacggatgcattgagttagattcagatgtacttgttgagccggacatacttgttgatgttgagtcagaaatgctttgtgaaccagacatagatgtactcagtgattcggatgtgcttgtcgaatcggatgtgctcaatgacgttgatgtgcttgttgacactgattctgagtcactaattgatgttgagtcggatttgtcttgtgacattgaaacactcgatgaattagattcactcattgatgttgagtcagatacgctcgttgaacctgaaccagacgtacttaatgattcagatatgcttgttgaagttgaaccacttgttgagtccgatgtacttgtcgatgtcgagtctgaatctgatgtactcaatgattctgagtcactgatagaagttgaatcacttgtagattctgattctactgtactttgtgaaccactgatacttattgaagtagaatcactgatactgtctgatgttgataatgatgtcgacaccgatgtgctttgtgatgacgatgtactagcactcattgacattgatgttgatatcgatgtacttaaggaaccagatgcacttgtacttgttgactggctttgtgacattgaatcacttaatgatgtagatgtgcttgttgagctcgagtcacttacacttgttgaacctgatattgagtcacttaaacttgtcgatgttgaaactgatacgcttccgctcattgagtcagatgttgaaagtgatgtactcgttgaatttgatccactgatgctagacgaatcacttgtagacattgagtcgctttctgatgcactgatgctcatagagtcaaattgactattacttgttgagcttgactgcgaatcgctcacacttgttgacgttgattctgatccactcatactttgcgagctactcaatgattttgaatcacttaatgaatccgaagtgctaagacttgtggaaccacttaaagatattgatccacttaatgagtcggagtcacttgtactagtagaatcactcattgatattgaatcacttagcgaggtagactcgcttacgctttctgaaccacttaatgatgttgaggtactcaatgaaccagatgtacttgttgaagtcgaaccacttgttgattttgaatcacttaatgaatcagattcactcacgctttctgaacttcttagtgacgtcgatacacttaatgatgacgaatcgcttgtgcttactgaatcgctcatcgattgtgagcaactcaatgaacttgactcgcttacactttctgattttcttaatgacgttgagacgctcaatgagccagaatcactgacacttgttgagccactcatcgatttagagtcactttcagaattagattcacttacactttctgaatcatttacagattctgacatactttgtgaatcagatatgcttgcgctcattacttcactagccgatgttgatgtacttgtcgaatcacttaacgatatagacacactcatcgaaccagatgtactcgcacttgttgagtctgatgttgaatcactaacactatcagataatgacgttgaatcactcatacttgttgatgtacttgtcgaaagcgacatactttgtgaatcactagtacttgtacgcatcgaagtactagttgaagctgatgtactacgagagtcacttgttgatgttgatgtacttgctgatcctgatgcacttgtacttcttgatgtgctttgtgaatcgcttaatgatgttgatgttgaatcggattcacttgtactttctgatgttgagccagactctgatgtacttaccgatgtagataaacttgcaatggtcgacatgcggtttgaagttgatgtacttagcgaatcacttaatgatgctgatgtgctttgtgaatcggattcactgctttgcattgacgcagatgttgaatcacttaaagatgttgacgacaaatcggattcacttgcgcttgctgagttattgagcgatgttgacgtacttgctgatcctgagttacttgtacttgttgagtcactgagtgatgttgacgcactttctgatgttgactcacttgcacttgttgagatactttgtgaatcagattcactctctgaaccacttaatgacgctgatgtgcttaccgaacctgattgactcgtacttttagatatacttgttgaatcgcttagtgacgttgatgtcgatgtggattcactttggcttgttgactgacttgtatatgatgatgtgctttgtgaatcggattcgctcgtgcttgtacttgttgagtttgaggcactttggcttgctgagtttgagtctactccgctttgattcattgaggcacttagtgacaatgatgtactcgttgagtcagacaaacttgtactcgttgacgtacttgtacttcctgatgttgattgagacatacttatgctcattgatgttgaatcggatttactttcacttgatgatgttgagtcggattcactttcacttgtagaaccacttaatgatgtggatgtactaatggaatcagatttacttgtactgattgaatcacttgtcgacattgatgtacttaatgaatcagacttactatcacttgtggaatcacttaatgatgttgacaaacttgtagagtcagacaaacttgtactcgttgacatactcagtgatgttgaaacactctcgctcttaaacgttgacgttgattcactgatacttgtcgatgttgaaatggacgtactaccacttgttgaattacttaatgatgttgatgtgctaccagattctgatgtactgtctgataatgacgtactctcacttgtcgaactactcactgactctgatgttgattcagacgtactttcacttaatgattcacttaaaaaggcagatgcactttgtgattctgaatcgctagtactatttgattcacttaatgatataaacgtgctctctgaagcagatattgcttcacttatagagtcgctcgttgacgttgattcacttattgaatcagactctgatgtacttaagcttgtggaatcactcatagatgttgatgtacgttctgaattacttgtacttaacgatgtcgaagtacttaccgaaccagatgtgctcgtagaagcactttgtgatattgattcacttgatgcagttgatgctgatttgctatcactcgttgaatcactaaacgacgttgatatgctcattgaatcggattgacttgcactcattgaaccagacgtactttgtgattccgaagtacgtactgaagcacttgtcgacgttgatgtacttgttgaacctgattgactagtactttgtgataatgacttactatcagaatcagatgtactttgtgaatcacttaatgattctgatgtactacctgactgagacgtgctcattgaactacttacggacattgatttactgtctgatgcagataatgacccacttgtactgatagagtcacttactatctctgaagtactcatcgagtctgatgtacttgttgagacactttgtgatgctgctatgcttagtgatccagaaacagaaccacttgtgctcgtcgaatcgctcaatgattctgatgtactcatcgattttgaatcacttgtacttaatgatattgatgtactttgtgaatctgatttgcttgttgacgcactttgagagttggctatgctatttgaaatactgatagagtccgaggtgctagctgactcgctcaatgatgttgatgtactaattgcattcgatgtactgtcacttaatgatgctgatgtactagacgaccctgatatactcgttgataagctttgtgacttagacaagcttcctgatgtactcatacttaatgagtcactgagtgatgttgatgtacgcaatgaatcagatgtacttgttgatagactttcggatttttcagtactgctagagtttgaaatagaatcgcttaatgatgttgatttactagctgaatccgacatgcttgatgatacactttgtgaattcactaaacttgtgcttgttgagcttgatacactattactttcagatgtgcttaatgacttagatgcactcacagaatcagataggcttacacttgtcgatttcgaggtactagctgatgtagataccacaatcgatcctgatgtactcgttgatgcactttgtgagtcagctttacttgttgacacactttgagattgttgtgtacttcctgatgttgatacggaatcactcatgctatttcttgttacttcatatttaaaagttgtcgtcgttttgttaccgctcgcatctgtagaaacgattgatatagtacttgtaccaatgtttgttggtgtaccactaatagtattatttgtactatcaaatgttagtccggatggcaatccagtcactgtattcgtcaccgcatttccactgttatcttgcgtagcaattttaatcggggatattggtgaatacacttctgatgattgatctcctattggtgtcactgttggtgctgtcgtatccacaacatttattgtaaaagttgtcgtcgatttgttatttgcttggtcagtagacacaactgtcactgttgattgaccaatttttgttggtgtcccaatgattgaattcgttgcactatcgtaacttaatccgcttggtaatcctgtaactgtatttgtcacagtcccagtaccattatccgttgtagtcaatacaataggattcattgttttacccacttctatggtttgattgcctacagttacagttggtgcttttacatcagtaaaataatatgtcactgattgtccagcattcgtcatttttacagttttatttgtatcattataagttgacgcatatgaactatcgacggacgtgtagttatatcctttagcagtcaatgcagattgctgattatcgattgtcacgacttgatcaacatttcctgaatatgtttttggtggaataatatctttacctgttgttacatcaacgtatctcacttgtgtaacagcagactctgtatattcgaatgttccaaattgtacttgttgtaaatttgtcgcgccacctgttgaggctgtcattgataatgaaaagttggtcgtaccacttttcgcaatccaatctgaaatattacgtgtccatgtttgacctgcatatttgacagtcataacctttgtatcaccattatagttaatatcaaaatcttggaacgtgttatttgtaggttgaacatttaacttcgcagcattatcagctgttgaacttgatgtatacgttgtcgcaacaccataactatctgttgttacaaatgcaccaaacgcacctccaccagctacattagatgggtcagcattcgcctttgcagctgaatttggtttagatgtattgtgatacgtatccaatttgaagccaaatgcgttacttaagccaccaatacctactgcggcaccgtttaaccctgtttcacctaatacacctggtgaaaaggcaaaaccgataccatctccaccatttccatgcccttcatatttgttacctaaatttacttttccagaaaaatgaaaactcttattagagtcaatacgtgttcctaatgtaatagcacctttttggctgtatgcatcctgtgttaacgtcacaataccggtactttgatcataggtagcattacctgacgttgtcatatattgttttaagttatctttattaactgtaattgtattagcagttactgcggttgtcgtcgctgctgacgcaaatgttgacatagctaagcgactgaaagttcgaagttttactggtgcggtgctagttgacgttgtgctagttttgtttaagttgaccgaagatggcgttgtgctttgtgaagtgttatttgatgcagtactttgatttgttgatgtattaattggttgttctgtacttgaagttgaagctacagatttagtatcagaacttgatgtagtattctttgaggatgttgattctgatgtagatgtcaatttctcttgttgattgcttgtactattagttgtcgaagtgaccttttcagacttttcacttgagactgtgtcactatttgatgtttgtaccgaactactatttttcgttacacttgtggaatcggctgttgatgttgatgcttcgattgtcgttgagttttgattacctactgtttcactttgtgtgtttaattcagaagttaatggtgcatcagaagccgcaaaagcttgctggtcatgcaacatatttaccgtgaatgcaccaccaataaccgccgtagttttcagtccgtatcccgtcatttttttactaatgctttgattatcttgactcactaaactatgactaataaatggtagccccataattttgaacatttctatttctttaattccggattttacccaattttttccagatttataaagtcttactcttgttttttcgtttgctaagctgtcatgaaatgctttctgtcttttactcatgtaataactccttgtattatctttacattcattagattataatatatgccactattcaatttaatacaactcttttttgatacaaaaatactcattttgttaaaatttgtaaaaattcatttttattcgtctaaatgtaatcgttttcatatttttaaaattactttttctcgtttatgcgtataatctttttttatataaatttggctaattggctttatgtttaatcattataattgtttcgtttttaaaataattattgtattaatatatctataccatccaccttttatttataaatagttaatttacaactaaacgataaatattatatgcaaaatacatctttaatattaaagtaataccaatattttttcaataaacctagtgtaatatatgtgtaattctaaaagattcttctttaaaaatataaataccacgacatattgctttaacattttcatttataaagcgaaaaaatgcatcgctactaagttgaatgtttagtaaggatgcattgaattcactaaaatgattaaattacttatatcttttcatctgattgattatcgaaatttcttccttctaaacctgctaactcttctttagaagctgcaggtgctttcatttcaaatatctcattcactactgtgtaatcgtaatatcctaatctggcaataggtttaatcgacttaatgtccaatttaccattatcaagaataaccttatcgtcaatatgaacttgggcaactcttcctataacaatatctacggtagatactggatctccagttggaatacgaatcgtttgaacgtactcacattcaaaatgaactggcgattcttttacacgatatcctggagcttctatacatttttcctttgttacacctgcaaaattaaattcatcctcttctggtggcaatgctttcgatgataaattaactgcttctcttaaatcatacgttgccatattccacacaaaccaacctgtctcttcagcatttttcactgtatctttacgttcgtgatcaccaagaacggattgatttgctgcgaacataaccataggcggatcccaagttaagttttgatactgactataaggcgctaaattatctttcccatctttcgatacagtagagatccaccctattggacgtggtactgtactacttttaaatgggtcgtgcggtaaaccatgacttcttacaccttgttttggcgaataattcatactatcttcaccccttataagtaattacatttaaggttacgccctctttacataagcgtctaatataaataaacaatttatttataagtagaaactatatatgacgtggttgcttataatttgcgttcttgattcgaaaaattcagataaggatttatacaattaatatttatgatatcttttgtaaatttaattaattatagttacttcaatcatgattagtttataataataaagtgaaattgaaaaagacagctattatgcgatgagcgaaaaacttcaagtaaaacaagaatttaacggcgttacaaggcaatacttgaatttcagaacagatagtatcgatgatctggataagttcaaaaaagaattcaaacctgttatgcacttaaaaggtgatgcattcaatcaacagttacaatctttgattaacaaatatccacaaatacaaaaaaatatgaaatcagagttcattgcttattatgataaagaaaaaaatagagaaacagtaaaaaactatgcttggaaccttcaaaaatctataaatgacattatgcaatcatatcctagcacaaaatttgtacagttttataaagatgatgtttccccgtcaatggtagatggaaatggccgtttaaaatcggatactaatgtaatttccatcgagggaggaaagtatgatgagaacaaatgatcatataaccgatttagatgctattgagttaagtagcggttggaattacaattcgaaattggagactggcaaaaatgcactactatcagatagccttttaagagatattaaagtattaagttctaatgctaaaggcgacgctgacatactagaaacagaacttcgtgctgtaataaactcaatgtctcaaaacgaaggtaaatctgttgatgcacttaaaaatagtaccgcttctctaaaaaacaatctaaccaaattaaaagagcaactcgacaaaactacacattaatttcatacattttgagtgaacagaattatatttccatagcaaacattcctaaactacacatacgttacataattgattcatttttatagaaacgggtaaaaatgataaagtaatcatctttcacaaaaaatcaaatattgggaggaattaaatatgattttgcgttacgcaacgaatttaaaacttgcgaaagagctataccaagccagtaaacctaaattgcaagaagataagggtatgattgaactgtttgaacatacttttggcttgcaaaaagaacttgtaaaatacgtcggcattgcagaagcaactactgctgctttatactcagctagctttatcaataaaaacatttctcgccttgcatcactatcaacgataggcattttaagtgtagctgcttacaaacatttcgaagctggccaaggtaaaaaaggtgcacaacatgcattaaatttattaggtcttgctactttaagtttactagatacattttcttgtaataaaaaatagtcttcattttagaagcacatactttagcacctgtgtacttttgattcaattcataaacggtataccgctatagcatgtgttttattatttttctggtctctttatcgtaaatattccccctaatttagcataatcatttccggctaaacgagaaacagcctgtaatgcgtgtggattgattttaaaatcaccctcataaatactgtcatcaatatgataagttacaatttcacctattattaaatcagccccatctaatacatctccaagcaatatcatttgcgatagtttacattcgaatctcattttcgcatctttaattcctggcgtcttaatcgttgtagatgttaaaagtgataattctgtacgactcaactcactgtcaccatatgctaacggcgctgcagtctcattaatatcttgaacattatcttcgtctgtaatatgcacaacaaagtctccagtccgttctatatttaatgcagtatcttttctcttacctcctgcacgttgaactgcaatagcaatcattggcggatgattattaacaatattaaaaaagctaaatggtgctgcatttactgatgcatcttgatttaatgttgtaacaaaagctataggtcgtggaataattgaaccaattaataatttatagttttctctagcagttaatgattgtgcatcaaacgtatacataatacctacctcttttctaagtatatctaggtatttctccgattttggttaatttaaacatctattctcctctgaaaatcacttgtatttatttagcaaatcttttgaaatatgacacatatgcatatcttctggatatttttctaaatgttgctgatgttcttcagcacttttaatgtagttagacagcggtaagacttccactgcaatttgatctctgtctttacgtcgttcaatgaactgacgcgcttcaattaagtggtcatctacacaactatataaacccgttcgatacttttgtccaatatcatttccttgttgattcacactgtaaggatcaatgatttcaaataaataattcataatgtctgtaattgttaacatacgatcatcgaaatgaagtttgacacattcagcataaccatcatacggaccgtctaatttagagcttcttccatttgctcttcctgcttctgtatgtataattccaggtattgttgcaaaaaatgcttcaacaccccataaacatcctcctgctacataaacaactgccatatttacacctcatcatccttttttatatttttaacaaggttataccatttaataccgccatgacatgattctgatacaccttcattacgatacccatatttttcataaaatgaaattaatgattctcgacatgttaacgttacaccatgtcgatgatgattcttagcaagagtttcaaaatagtttagtaagcgacctgcaataccctgaccttgataatttggtgctacaacaagacctaacacactaatatagccaccttcactattatttgtggagacatttttaaataaatcatcgctaatgtaacgctcttttatgactggaccgttgatgtatccaattacttcatcattcttttcagctacaataaaagtttcttgaatttgttcaattctcaatttcaatgcctctcgtgttgcagcttcttccggtgaaaaaccaatattttcaagtgcaataatttgatctaagtcctgcatgattacttttcttaataccataaaaacacttccttagccctatatatcaaaagtaataccttcatctttatattcattattttcaaactaccttcactataaaaaacgagtctttttattgaaagccattcgccttaatcaattagacaagttgtattatacgaattagtaaataatcatgattataattcattttaagcatactcaaaaagactggtacatgtataccagtctaattcgaaaaaatatatttagttaaaaccatttcaaaaacgacttcacttttcctggcttagtcggtctgtctaaataaacaaaattatcattgattactgaactggcatttcgaagtaatgcttcaatatcattcgaatatttcttcaatttatgattgtgaaataattcttgcatcaaaaatggtctttggtcacatgaatgtgcatctgaagctacaaaatgagccaaattacattctataaattgtaatgataacttttgaatgtttttaccaaatccaccaactaaagaactcgatgttaattgactcagtgccccatttgcaaccaattcatataatatttccggatttttggcgatacttctatttctttcaggatgtgcaatgattggtatgtaacctctcgattgtatttcaaaaaacaattgttttgtataatgtggtacttcgcccgttggaaattcaattaataaatatttcgaacgattaataccttgaatactaccattatctaagcctttcagaatcgaatctgtaattctaatttcttgcccgggaaataatttaatatccaatgcttgaacttctggatgcgttcttaactccgccaatttcacaagcacttgttgaaatgtattatcatatctcggatgcaaatgatgaggtgtcgctacaatacttgttacaccttcatccttagcttgctttaatagtgcaatactcttttcaattgttttaggaccatcatctatatcaactaatatatggttatgaatatcaatcatgattcatcagtcccataatatgcatagtaactagcacttttatctttaggcattctatttaagactacacctaataatttagcacctgttgcttcaataagttcttttccttttttaacttcatctctattattattttccgaattaactacgtagacaacattgccggtaaactttgaaaataattgcgcatctgtaactgtgttcactggtggcgtatcgataattacaaagttataattcatcaataatgtgtcatacaaatttgcaaatgcccttgatgtaattaactctgacggattcggtgggattggcccagacgtcaagacgtctaaatcttgaatttcagttgagataatactgtcttgataagttgaccaatttagcaataaacttgataggccttcattgtttggcaaattaaaaatataatgctgcgtaggtttacgcatatccccgtctacgattagtgttttataacctgcttgcgcatatgcaactgctaaatttgctgcaattgtagacttacctgcgcctggtgcctctgaagtgattacaatgctttgaactgcactgtcaggatttgcaaacataatatttgatcttatgcctcgaaatttctcgctaataggtgactttggttgttcatggacaattaaacttgatgtacttcttcgtgtattcgtcatggtaattcctcgtaaattaaaatttttgtattgaacctaaaataggtaatcctagttgcgattcaacatcttcttctgtcttaatacgcttatctaataattcttttaagaaaataatcaatattgctaaaacaataccaacaataatgctgataactaagttgacagatactattggagatacttttacagcattatcatgtgctgaggaaagtatcgtaacattatcaacactcataattttaggcatgtcatgagcaaaaactttagatattttattaacaattttgtcagattcagatttattcccagtggtaactgatacagtaataatttgagagtttgtttgattggttacttttaaaaatgaattcaactcagctgttgaatactgaccatcaaattctctagatactttatctagaattctaggacttttgataatttccgtatatgtattaacagactgcaaactactttgaacattttggaaagctaaatcacttgaggactttttcatgttcactaatatttgagtagaagcagtatatttgtcaggcataacaaaaaaggttaatgccgcacttactacaagacatattgccggtaaaataagcaataatttaatattcttctttagaatatttaatagttttactaaatcaaacttttctttcatggtttcctccacataatcaatcattgtattcattatgtatgttttataaatcggacaattatatctagtttaacgaccacaaaacatacacaactacattttctctaattatttatataaatattttatcgtttaaaattatatcatgattctctaccattatgtataacttatttatatttttgcacaagatataatattgtccaactttaaatatccaaacctattaataataaaactagataccatcgtactctatcatggctttcttataatcgagtagaagcatcatcattacttgattatttgctctttacaacaccgagcgtgcccgtactcggtaattcaataccttgcgtaacccgtcactgtgagttgggttaatgataataaagcccacaccttttaaaaagatgtgggtaatttatataatttttatttacatttttaacttataaaaaaaagcgcctatgtcatgatttaccatcacataggcgcttatcaataaattattacttattactttccatttcatctaatttatgcggatttcctgtaattagatgacaacttattcttttcaggggaacattacacttttataatatgttcaaagacaaacttaaccattcacaaatataaagaataatattatcaaatcattgaacaaatcgtattttgcaacaattgatatttatattaatgtattgcatttaatttataaaattcatatacatcttaatattctcaatatcgatttgtattgtcaactttatatagatttaaaaaaataatctcatgtctttttttacaaaagtaagttaattattacaaactagtaacaaaaattatttcttcaaaaatatatttagtagcgaatacacttcatctttgaattgacttttactttcttccactgctccaaatttttgcgaaaaggatgctttcaaataccaactttcaagaaacagcaatattaaattctgaaagtcttcttttgtcatctttatctttgattcatcatagaattttgctatctctttacttaatgattgatttaaatcttgtatttgtccgtaaatatttccagaaaattcctcaggcgtattagataattgaacgtacattctaatatacctttcttcgatgtcgaaaataaactcaaataagaattgatataaagcatcaattgaatagttcgatttattttgattcatcataataatattattaaggtaatcaaaacaacatttaacactttgttcgtaaatactttttttcgagtcaaaatggtaatataaactcgctttctttatatttacacttttagctatatcatcaagtgttgtaccgtcataccccttctctgaaaataaggttattgcgttatcaataatcttatccttcaatttttataaccccctactgaaaattaatcacactatgttacaggaaaattaagttgcaattacaaatatttccgtttaattataacaacaatctattgcaaattaaaatactatcaattaccatatggcttacaacctaactaacgaaaggtaggtaaagaaattgcaattttttaactttttgcttttttatcctgtatttatgtctatttactggattgtcggttcaatttatttctattttaccagagaaattagatattcattgaacaagaagcctgacataaatgtggatgaattagaaggcattacatttttacttgcctgttataacgaaagtgaaacgattgaagatacgttgtctaatgttcttgcactcaaatacgagaagaaagaaattattatcattaatgatggaagttcagataatacagcagaactcatctataaaatcaaagaaaataatgactttattttcgtcgatttacaagaaaacagaggtaaagccaacgcactcaatcaaggcattaaacaggcttcatatgattatgtaatgtgcttggatgcagatactatcgttgatcaagatgcaccatattatatgattgagaatttcaaacatgatccaaaacttggtgcagttacaggtaatcctagaattcgaaataagagttctattttaggtaaaattcaaacgatagaatatgcaagtttaattggctgtattaagcgaagtcagacacttgctggcgcagtcaatactatttcgggtgtcttcactctatttaaaaaaagtgcagttgtcgacgttggctactgggatactgatatgattaccgaagatattgcagtttcttggaaattgcatttacgtggatatcgtattaagtatgaaccgcttgccatgtgttggatgttggttccagaaacattgggaggtctttggaagcaacgcgtgagatgggctcaagggggacacgaagtattactacgagacttttttagcacaatgaaaacgaaaaggtttcctttatatattttgatgtttgagcaaatcatctcgattttatgggtatatatagtgcttctatatttaggctatttgttcataacagcaaacttcttagactatacatttatgacatatagtttttcaatatttctactatcatcatttactatgacttttataaacgttattcaatttacagtcgcactctttattgatagtcgctacgagaaaaagaatatggctggactcatatttgtaagttggtatccgacagtatactggattattaacgcagcagtagttcttgtcgcatttccaaaagcattaaaacgtaagaaaggtggttacgcaacatggtcaagcccagacagagggaatacccaacgctaaaatcatcgctaaatattgtaagagaaacagcacttatcgctatatcttgtgtcttttggatatattgtttagttgttctactcgtttatattggtactatatttgaaattcatgacgaaagtatcaatacaatacgtgttgctttaaacattgaaaatactgaaattttagatatatttgaaactatgggcattttcgcgattatcatttttgtattttttacaattagcatattgattcaaaaatggcagagaggaagagaatcgtgaagtatagaaaatttataattttagtgttgagtatcttgatcatattgcctgtaagcacactggatggtcatcatattgcaaatgcagatgacgattcacctaaaaaactgaaatataaagaaaatagtgctctggcattaaattatcaccgtgtaagaaaagcgaattttctgaataattttatttacttcttttctagtagtaaagaaattaaaaattatagtgttagtcaatcacaatttgaatctcaaataaaatggctaaaatcacatgatgctaaatttttaaccttgaaagaatttttatattacaagaaaaaaggtaagtttccaaaacgaagtgtatggattaactttgatgatatggatgaaactatttatgaaaatgcttatccaatcttaaaaaaatataaaataccggcaactgggtttattatcacaggtcatgttggggaagaaaactttcacaacctcgatatgattagtaaaaaagaactaaaagaaatgtataaaactgggttatgggaatttgaaacacatacccacgatttgcataacttatctaaaaataataagtcaaaattaatgaaagcttctgaagctacaatcataaaagatttaaacaaaagtgaaaaatatctaactaaaaactttaaaaagtcgcagaaaactatagcctatccttatggcttgatgaatgacgataaattaccggtaatcaaaaaagctgggttaaaatacggtttttcattagaggaaaaagcagtcactccgaactccaatgattattacatccctagaatattaattagtgatgatgcttttgagcatttaattaagagatgggacggattccatgaaaaagattagacttgaactcgtatatttacgtgctattatatgtgcaattattattatcacacatttacttacacaaattactttaaaacatgaaaatatggagggtggatccttagtgttacaattttacattcgtaatattgtgatttttggtacaccttgctttattatcttgtcacagttactgacaaccttgaattaccaaaaagtcacctatagatacttaactacacgcgtaaaatatatacttattccttacatattaatgggattgttttacagttatagtgaatcattattaacagattcaagtttcaataaacaattcattgaaaatgtcctattaggtcaatggtatggctattttatcgttgttatcatgcaattctttattttgagttatatcatttttaaaattaactataacctattcaacagtaaaatattattattgttatcttttattttacagcaatcatttttatattactttacgaacaacacagcgtttcacgataccgtgctacactattatccattaagtgaaaatactataatattcggatggattttttatttcttcttaggtgcatatatgggttataactacgaacgtgtattaaatttcttagaacgttatttagttattatgattgtattagctgtagctacttattttgtgtttattgcgttagcaaatggagactattggaacgttaccagcttttcatattcattaacaccatataatagtattatgtttattgttatcttgggtatttgcacgcattttaaaacaatgttatttaatacgattcaaatgattagtgctttctcattctttatttatttattacatccaatcattctagactcattgtttgcatatacaaatatatttgaggataatacaatggtctttctagcgatatcactactattcattttaggattatgtataggtgtcggcatgatattgcgtgaattctatatctttaggtttattattggaaaacaaccatataaattgaacattaatgcttattaattattaagctatgttaaaaacacgcggtgggcgaaatcagtttgaattgactgacttcgttttaccgcgtgtttaatattgttatacatatattctaattgcacatttaaacttcgtaaatgccaatgggagtgggacagaaatgatattttcgcaaaatttatttcgtcgtcccaccccaacttgcacattattgtaacctgactttccgccagcttctatgttggggccccgccaacttgcacattattgtaagctgactttccgccagcttctttgttggggccccgccaacttgcattgtttgtagaatttcttttcgaaattctttatgttggggcctcgccaatgttttacttgaataattcttttagaattctaaataatgatccgattaattgaaagaagtctgcagtcattattaattcctccctttactttataaattatgcttgcttagtatcagtcagcttttcagttttcactaaatcgtctgctaaatgatgccaaaaatcttgtaattcttctcttgtgcgcactgtatcagaactgtcttgtcctacaaagtcaacatgatcccaatcatgttttgtaggcgtcacttgccaaatgcctttttgaattttatctgtcgcttttgtataagcttgattaaatggatgttgagaagaaataacggatactaaaccatcgttttctcgccattctttttcagtagctttaccgattaagttaccagtaatcacaaatgggaaaaacatatttaagtctgctttttgtctatcgctatttaatgctttgtgcgttgcttcaccagtgtatgttttatacacaatgttagggttcaacgacgttttacgatttaaatctgttgcaccctcacgcgtcagatcgtaaaatccattatcttttgatttccataaattagattgtttaacgcgtttgacataatcaatatatgattcatttggcttctgttttagaccccattgagccaacccgaagtctactcttgaatttttattaccaaacattttaccgatatcaaatacgatttgtctcactaaagcttcattaccagctaaatctgatgcgtgtgtaccattatgtggtgttcctaaagtagtaattgatgaaatcatattgtcatgattacctttgaatagtggagaaatttcgccaccatgtttcttttgatactctatttcttcacgattaccattacgcagtaattcttctagttgacgtatcgtttgaccgcccatactatgtccaactaggtgtaccttctgtcctggtttccagtctttgtaaattccttcgtatgtttttccataacgttcatgtccatattttgctgcatgtgctgcaccataatctacacgaccgcctttgatataataataaagttcaactgcgcggtcatagttacttccaaaagcacttatacttgcttcataagctttgtaaccattttcttctaaatcttggcgaatgttcattttattaccgccccaataatgagctaacactgaaggattaatatcatctgtaaacccattgaaaccatgcactaaaacgataggatcctgatttttatactgcccttgtttggcaactttattcgtttgatcatctttcgcttttgcagtaagttcctttgtccctttgtttggtaacgttgctactgcactactttttaataaatttaatccatttttcttgtcattgtcctttgttggttctactggtgatttttgattgttttttaaatctgaaactgatagtgttttttcgtctttttgaggtttcacttcttgttcattgttaaaattgtagttagtaattttatcattcgcttgattattttgttgtggttgtactttctctatttctgtctcattaacaatttctcgttgacttgtttgatctaacttatttaatgatggtgcttcctttattcgactttgtgaaggtagattgttattagcgtttgaatcttgactattatctgcctcttttgactgttgctgtgacgccactttactttgtttaccatcattaatagcctgttctaacccttgatttacatcgctaggattagcattgttattttttgttgtatcacgttgaatatttttattattaagcgatgattttttatcatcctttagttgatctttattcaaatcatctgttttacgatgattttcttctgatattgttttatcattatgcaagttcttagttaaattttcagtatgttgctgttcgtcaacaccgttttcacgttgataattagcattttccctagtttgttgatccccaatagattgtgctgtaactgtatcctcctgtgaatttcccatattcacttgcttctcagctgcttgtgcttgtccaccacttaaaaatagtaatgtagctattaaaatggaagatgcacctacactaaatttacgaatactatacttattttgacttttcatcattgtcagcacctctatttttttattttagataaacaaattgataattattcgaggaataaactcaaataatttacttaaccaagcactcataatgaccatcctttctattgtttaatttgacgagaaagcgtttacatttgtatttaaaaaatatattctccaaagagaatttaaagtgtatacgctaatcatttcaaattattaattaatattatatttggcaaaatttaattagtcaataattagacacaatttaattatgcaaattgtaacttttttacatatatcttttttgatttttaatatttacatgcttggggcttaattccaatgatgtattatttttttagattagctatatggggagatttatgagctattacagttattatgtttgctggtgtcgtattttaaacctaaaaatatcatcccatccacaataattgtatcaggataaaccgtaatacttgttcctaaactaaatatatacagttaattttcttccctcaaagtaagtatcctactatttttaatttattgtttaattactcttgaactacctttaacttaatctcgaatttatgatgattagcataaaaatacatcccataaagttagttttttagtctaactttcgggatgcatatcttagttctaatggagattgtcttttaaataggctatgacatttctatttcaggctagatatatttgtatttatagtataaatacaaagaatgtaaagacaactatgatattaataggtagtaacgacaaacataactctttagctttttcgccattttttcccttcataacttcattatatcgattcatatacttttcgacatctttaacagtgacatctattcctgagttgctcaatttactttttataattatttttgatttcgtattgtgattatccactacttatctataacgagttcgcaactttagtaccatcacagcattcatagttaaaatatgttggtgtcgtattttaaacttgaaaatgtcacgttttccacaatatttgtaagtgtataagccatgatccttttccttatatcttagtccatacttgctttaccactgttcgatattttgtcgttcacctttaaagttattgcgcttatgatgtctacgcgctaattccgcctcaatttctgaaaaatcgacgccaagcgcatgcatcaagacaaataaatgataaagttcatctgctacttcacttacaaatgcttttttgtcacctttaattgcttcaattacgacttcaaaagcttcttcaccgtatttttttgtaatcttttctataccttctgttaataaatattttgtatatgacttttcattattggattgggcactatcttgaactgtctgcgctaatgtttgcactgaaaatggaacttctgtgttgaaacaactttgactgcctgtatgacatgttggtccatttggtatgacatcaattaaaatagtgtcattgtcgcaatctacatgaatatctttaacacgttgcgtatgaccagatgtttcaccttttgtccatagccgttgtttcgaccgcgaatagaaacataccacaccatcttctatcgttttatcaaaagcttcttggttcatataacccaacatcaatacttgttttgtttgattatcttgtaaaattgctggcactaaacctttgctaaaatcaattttatatttggtcatcttactgctataccccccttgccgtatcacttctttaatagattgaaccgtcgtttctcgatcatgtaatatacttgcagctaaacctgcagaaacatccgtctgatcaaataattctacaaagtgttgtgcattgccaccaccaccagaagcaatgattggaatatttacaagagacttaatatttgctaggtgttcaatatcaaagccttgtttcataccatcatgtcccatacttgtaacgaggagctcacctgcacctaactgttctacttgctgtacccagtcatatactttaatatttgtcatttttttaccaccagtcgtacaacaataatgtgcttttctttcaggatcataatagctatcaattgctatgcagatgcattgtctaccgaatttatcactcgcttgtttaatgagctgtggattttttaaagcacttgaatttaatgatactttatctgcaccatgatttagcaattgggtaatatcatcgagactttgaatcccaccccctacagtaagagggataaacaagcgtgacgctgtctgttcaatcacttctagcattaagctatgaccctcttccgtcttagagatgtctaaaaatactaattcatcagcacccgcttcattgtaatacattgctaaatcaacaggattcccaatatcccttaatcctttaaattgaatccctttaacgacacgaccatctttgacatctaaacatggaatgatacgttttttaatcattttagcccctcccaaaaagatgcttgatgtgcagcctttcctataatagcagcgtgaacatttagcgacgctaatcgttgaatatcttgctgatgtctaataccaccggaagcaatgacaggaatcgtcgttgcctttactaattgaccagttaattcaaagttaggtccggacattttgccatctttagcaatatcagtatatataatgccgccaagaggtatatccgataaccgtctcacaaaactaaataaatttaactctgtgtcctcttcccatccgttcactttaatatcttctccataggcatcaacagataaataaatgcgacctggaaatgtatgtgccatctctttaagccaatcagtatcttgaatacctttcgttccaactatgcaataattaatccctgcggcaaagtagtccatgatttgtgacttcgtacgaatgccaccacctacttcaatatctttggttgttaatctcctcaatgacttaatataatcaaactctcgggcatgctgtgccttagcacctatcaagtcgacgatatgaatacgattcacacattcaaattgactatagtaagcaatactttcttcagccgagcgtgacattttttcttcactatcatatttaccctctgttaacctcacacttgttgacccaatcaaatcaatcgctggccataattcaatcatttataaatcccccttgtattgcctgacgcaaaatttgtaacccatatgtaccgcttttttcaggatggaattgaataccaatataattgttaaattgaacaattgccggaatatcagccccatactgcgcatatgcaattacattttctgacatcggcgcttgataagaatgtacgaaataaacatcttgatttaacatagggtgcttactcactaaattattccagcctaagtgtggcactgggtattctgtttggatacgcgaaatatttcctgggataaaccctaatccagatgcatcgccttcatcactatgctcatacattaattgcatgcctaaacaaataccaatcatcttcttatcagtattcttagccaatattgcattgagatttaatcgttttatctctgacatcgcatctttaaaatggccgacaccgggcaatatgattgtttctgcttgatcgattatttttgaggtatttgagacaaccacctcataccctaaatgttcaatagcgcgttttacattactaatattccctaatccataatcaacgatgacaatcattcaatcacacctttcgatgacggcacacgctgatcatcagttgcagttagcgctatgcctaatgcacgggaaaacgctttgaatatagcttcaatttcatggtgtgtattacctccacgaattaaatcaatatgcgttgttaatcttgcattgattacgaccgctctaaaaaattcttctactaactccgtatcaaacgtaccaactttttctttacttaatgatgcattgaatgataggtatgggcgcccacttatatccacaacgacacgtgctaatgtttcatccattggaatgtacatcgttccataacgaacgaaatgctttttatctttaatcatttcaagtaacaattggccaatgacaatgccgatatcttcagttacgtggtgatcatctacgtcaatatcaccttgtgcctcaatgtttaatgacagaccgctatgaaatgtaaacaaggttaacatatgatttaaaaagcccacacctgtattaatatgcgatggtgactgatcatcagatattgaaatatttagttgcgtttcagctgtgtttcgttgtttttgataaatcatattttgcactccattctttaacaatttcttctaattgctttaactgtgatgctgttgcaattgagtatcttacatagcccttcatcaccggctcatcataaaagcgaggtttaaatccttgttcatatacgtattgtcctaattgttgcgctgctgagcctttagtaagtacaaaattagcatttgatgggaacactgacattttatctgcaacatgtgtatcaaatatttgttttaactgctcagctaactgtcgttgcatcgttaaaaattgtcttgtctcttctctatgtctaaaaatataagtcgcaatatttagcgtaaatacatttaatggatatggatgttctattttttgaatatgctttatcgttccagcagtactaattaagacacctaatcttaagccggcaattccaaacgcctttgataatgtacgcattcttaagatgtgtggtgccagttccacgtcatatgccgtaccataatctaaatatgcttcatcaatgacaaagtatccgtttaatgctttcatcttatctgcaatagctgttaaaaatgccgtatcaaattgcttgcctgaagggttatgtggattactcataataaaaaatgatggttgtacttcatcgattttcgttaaaatggtttccaaatcaaacgttaaatctgatcctgcatctacaaatgcaatttcacgatttacttgtgccgcatatgcttgatacataaaaaaatcaggatttagcgttaatgccggaccttctggcatgatcagcattaacttttgaatcaattcatcagatccatttcctgcaataatttgttcaggcgataatccgtaaaacttagcataagcttccttgaattgttcatatgctgcatcaggatataaattatatggcgttgcactaataatagacgtcattgttttttcatccaacggcgtaactggactttcatttttatcaatataaatcatttcaattacactcccctaagactgacgtattaaaatagactgctggtgattgtataatgcttcaacatgagcaatatgttgtgctgaatcagcaatttgttcaaacgtatcttttgataaatggatgaccgtgttccgtgttaagaaatcattgaccgataacccattggtaaatctagctgttctatttgtaggtaatacatgacttggacctgcaacgtaatctcctatgacctctggcgaataatgtccaataaacaatgcacccacatatttcactttttcaatatatggttgaggatttactgtttgaatcgacgcatgttcaggcgcgattgtattcatgacatggcatgcttcatcaaaattactagcatggataaggtagtgttgattagcgatacttttagaaacaatgtcgtatctgtccacattaggcaatgctttagcaatacgtgattctaaatctttaaggacttgcgcatcttcactaatggcatatgtacgtgctaattcatcatgttctgcttgtgcaaaaacatcatatacgatggcatctaaatctgctgtttcatcaataataagtgctatttctgttggtccagctatttggtcaatacctacttgtccaaataaatatttcttggcatatgcaacaaattgattgcctggacctacaatcttatcaactttaggtatcgtttctgtgccataagttaacgcagcaatactttgagcaccaccaacttgaaatacttgatcaacttgcgtaatatagcatgctgctaatacttcttgagacacaccattaggttgaggtggtgtcacaacgacaatattttccacacctgctacttgtgctaacgtcgctgtcattaataccgttgaaggataacttgctttaccaccaggcacataaataccgacactttctagtggatggtatatttcataacactccactgattcttctaactgttgattcgtctgtttaatactttcttgatatgctttaattctttcataactttgttgtaatgcttgttttgttttttcatctaatgtgtcaaatgctgctttaatttgttcatgactaatttctaaatgatctgttttcgtatgatcgaatgttagattatacattttcaaagccttatctccatgaactttaacttcctgacaaatatcgcgaataattggatacaatgactcatctaatggtgcttctaatgaaaattgatttaaaaattgttgtgcattaagcattggcaatagacacctccaaagagcgaataaattgctctattaattgtgattttttaaaataagctgctttattagttattaatcttgcattgatatcactaatatgttgcttttcaaccagtccgttcgcttttagcgtagtacctgtttgaacgatgtcgacaattccgtctaccatatctacaacacaggccaattcaacagagccattcaatttaatcaattcgacatcaataccttttgatttaaaatatgtttcagcagtatgaacataactcgttgcgattttacgataattggtcgtttcaggtttcgctgcaaccgcaaaatgacatgctccaaaaggcatattcaacaaattattaacattatattggcgctcatctaatatgtcgctaccaacaatgcctatgtctgccattccttgttccacatagattggcacgtcacttccttttactaaaatgcattcaatattatctacacttaataataattggcgttctctattttttaatgtttctgataatgtcgtatattcaattacatctaaatagttaattaaactatccattagacgtcctttggctatggcgattcttaacattgtgcatactcccttacttaaagtgttaatcctaatccaaacccttcgatgcttcctttgtaataaccacctgttaaaactcgagattcattttcagcaaaatgacattgaataaataaacctgtgtaataggatctaggtggctgcgcagtaatatctaaatggatgtctttgtaaccttgtttatgtaaccaacgttcccatatttttaattcaacgagtgctggatggtcatttggaatatagtgttccaatacatttaattgttgttgcgtattctctttcaagatttgcacgattggatgttcagtcgacaaatatgtaaccagtcccgataaattacgttcctcaatcattgatagtatgtctggtgtttgtaacgatttatcgagtaaggcatcaagcaattgataatgtcccaatacaacaaaatgcacgttgtctctcaactgctgttgaataaactgaataaagagctttaagctctgttgcacattcgctaatgatggtgcatagttttccaaaccaacttgtacagccgcttcattattccgaatgattaaacctgtgtatgccacttttgttgctgcagttggatacattgagtaataacgcaataattgatctgtaaaatcatttcgaagtgcataaatttgatgctcatgttgccaaaaatttcgctcacccatctgctgcaaatcctcatggttcaattgtttccagtccaacttttcaaccacactaaaatcaactaactcataatccgctttattaaaatattttaaaaatgctgtttccgattcttttaacgcaattaattgttctgaattattcactcgaccaccctttactttcaatactgtatttaaaatcacttggtattttcgttgtttgctttacttctctaccacgctaaagtgtaatatgattaataacttatcatttttagcaatacattacaacctttttcagaaaattcggtgtattgattttaaaattttttaaaataaaaaaggcaagacatttgtgcctataaaaatgcttaaccaagatttttatattgaagttgtacttcttgcacatattgtccttgccttattatgtaaagttattttctttctatctttttattaaatttaactattcttcataatcccgattccctttaaagtaacgtctatcttgtttactatatacattttcaggattaaaaaacggtttgagtttatatttaaattcaaataagtttagaccatcaatcgcaaccctatcttggtaaacgttcgttgctgatatatctgtaaaattgtttggaccgacacctgcaataaacttaaactctgcttcatctaccaaataatcatacgcttgtgtatgtctatcctgtgcgccatgtggaaatacaaacatatctgttttacctacaattggttcaacttcatctttccatcttttagtatcacgtttaataccttctaaagatgttttttcaaaattaatgtgaccatatgaatgactcgcaaatgaccatccatcccgtttcattgcgcgaacaacttcctcagctgcctttttattctttgtataatctttactcgttaattcattcgtgcgataacctaatacgccctcataaccggttaaagcaacaacacctttttcaccatttaaagaaaaatctggatgctcttttacaaatttatttaaaattggcacgatatcattgtcatcagaataagtagcatggccttttttgtctgtagtttcagaaacaacatgtttatttttatcgagtactaaacggtcagcataaccatggtgtctcatgtaactatagtaattcatatcatcaattgagatgattagtggctttttacctttcggcaattttatttttttggcttttacatgatgagatgataagtcgtatacatcatgtggattaacgatgatgtaattatttttatataattcgttcaatgattttttaaattcacttacagtaatcatccaatcattgttgcccttagcttggtgtgtatctcctgtaaacgcaacttttgggtctgtaattaatgggtgataaaacacatgataaacttggccgtgatatgtttcccaatgttcatccattttcgatttatgctttgcatactcatttggattaacagatttattttgagctttctcattttgcttggaacagctatataacaatgcaactgataataacagaaaaaatagcaataaatattttttatgcattaaacattctccctatgttttattatgcacaattataacatttttattatgtggctcataactttttaagaaactgttgggattttaattttattttttagataatgtcatagtattttatttataaaacacaatatctccttgattgataatgtcgtccatagtatcgtctcgcttgaatttaagcctttctgctaaatttattgaacgttggttacacttatttgtcctgataacttttactgtttcttgatcgatataattcacaaaatttgtgattgctgtaatagcctcacatgcgtacccttgtccttcaaaacttggatgtaatttataaaataaatttaatactgtttcttgctttaattgtcgatattcatatccacaaataccaataacactacaatctattttttttaccaatacaaagtaaccaaattgatattgttgccaatggtttcgccatttttcaatccaccgttgtgtgtctaatttggaattatgtaaacctttgggagtgtatatatttgcttgtggatgactacaaatattataaagttcaattaaatgcgaggaacttggaatcattaaatttaatctttcagtatttatcattaaatgtctccctcctatttctatttaaagactatttatatgaatactaatgccacgggttgaaatatcgactattatttaaaaagaataatgtaactactaacatcagaagtattaacgtcaaacacaaaacaacataatcatctttttttaattgttttttgacgtaccaggttctccttttatactgtccgaattgtcttaactccatagcagtactaatagtgtcaattctttcgatactagaaaatattaaaggtaacacaatgcgtttgatacctttaacacggctagtaaattttgcttttttcgaattatcatatcctcttgcttgttgcgcttgtgaaatattaaaatatgtttcttgaatatctggaatataccttaatgctagtgagactgcgtaactgattttataattcacacctagctgatttaaacttgcagcaaaatgactcggattcgttgtgaataaaaatattaacgctaaaggaactgtactaatatattttaatattagattaaaaagatagaataattcctgtgatgttagcgtaaatcgaccaataccattgactaactctgtacgctgattataaatcttcacaccatattcagggtcaaatatgtacacggcaataatatttaatattgtgaaaaacagaatgaatttaacaacaaagcgaacttgtttccattcaatatgagcatatttgaccaataaaatagatgaagcactaattaaaattaaatatcttgtgtcataagtcaccattgcagaaatagaaacaactaataagaataaaagtttaacagtcgcatttaattgatgaatacgactatttcccgggtgaaaacctatagtattatattgattcattggcgtctcaccttcctatcatggttaataaataattgtactaatttctgtggctcgctaatccctatatattcggccatttcaaatagcgatgtttgtctcaatgatgcaatctcacagatttttttatcatttaaaaccaatactggcgtggtatcagcaacgacttgaccttttgataatacaactgttcttgaactatactcagacaataaatgcatatcatgcgtaatcataataatcgtcttcccctgtctgtttagttcaattaaaaatgacattatctcattataatgatagaaatcttgaccagcagtcggttcatccaatatgattatttccggatttaagactaaaacagatgctatagtgaccctctttttttgaccatagcttaaagctgcaattggccaattccgaaatgcataaagtccgcatattttgagcacattctctactcgtatctttatatctgattctttcatacctcgtgctcttaaccctaatgctacttcatcgtaaatcattttttcagaaatcatatgatttggattttgcatcacataacctacgaattcagatcgttcgctaattgacaattgattaaatcccctattacaaaattggatattacctgttatatctaaaaatccacaaattgctttagcaagtgttgatttgccggcaccattgtgaccaactatactaagcatttcttttctataaacatttaattgaacattattaagtacactattactatagtcactatattgaacacatacctcatttaattctaatagcggttcagatttgtacttattatcattatttgcagatgtttcatctatccattttttcactttaaatttaacatgttcactcatacaaacgtcacgtaaattcgctaagttatcaatggattcgacatctacttctgcatatttaagcgctgtacagtataatggttcacgtatgcctgcttctttaagcttagatgattttagcaaatcactaggcgttgtattagcgatgatttttccatctttaaaaagaagaactctatcaaacgtatcatctaatgattcttctaatcgatgttcgacaataatcatcgttgactttgtttcttcatgaatattgtttaacaatctcagcgtttcatgtcctgtcgcaggatctaaattggccagtggctcatccaatattaaaataggcgtacgatggattaatataccacctaatgaaacgcgttgtttttgacctccagataaatcttgcggtcggtgatttaaatgttctatcatgccaactttttcagcccaataacttacatttttcttcatatcatcttgttcaacacaattattttctaataaaaaggccatatcttcagctgctgttaagcctatgaactgtccatctgtatcttgtaaaactgtaccaacaacattagatctatcatgtaaacaactaacggttgcatcttgattatttatatatagttccccagttatgttacctttagttttaaatggaattaatccgtttatgcaatttgcaaaagtcgatttaccactacccgaagcaccaactactaatactttttctcctggataaatatcaacatttatattctgtaatgtaggtgttgcttgactatgatattgaaaactaaagtctttgaacgagataattggttcagtcatgatatatcattacctttctatattcatttacatatctgattcaacaaaataactattccttacgtaaactaccttttttaatttgagatgaagcatatgcttttaataatattgtcccaataatgccaactgaaataatatttaatactgcagagataacaccttgtgtataaaccttgttagctggttcgttataaatcaaaatatctaatgttggtgcaataagtgcccagcaaataatattcgcaataatttgaccgatattaaaataaaccatcgatttcctagaaaatcggcctgaagaaagatttaattttagtccaatccagccatataaacagcctataattcccgagcaaataacccaactccaccaggcactaccgtatgtcgtaaaatctttaatagcatgtccaactaatccagtcattaaaccagcaaaaggtccaaatattgcagatattaatgctaaaaatgcatatgatgtttctatattcgtattaggaaaacctgttggtattacaacaaaacgccctaaaattacaaataccgctgctcctataccaattgcaacaacagttttaactgaaatatcttgttttttcatcttcattactccttacataaaaaattcattatattgatggtgctttagataaatgaatcgtccaatcatttccagtaccaatatgatataaatctgaaaatgagtcttgattgactgctacaccaatatttactagcgagttaacatacacaagaggttcacccacattaacatctgcaaacgatcgcgcaaatttaataatattttgatagactttcttatcttgatgataaattgttaccaccaaattattaccatgaacaatttccaaggattttaagaatgccaatggaatatttgtccataatgacccaaatctgatatctaaaatatcaatgcttcctgtaacagaatcctcattttttgtcacttctcttatttctaatgcctcaatactatcaacattaattgcctgaccgagacgttcaaacgctatcttatttgcagctaatctcgcaccattgtatgcataaacatctctaccatgaaaagtatgactttcttccgaatgaggcaatcggcttttcacttcatcaatttcgataacttttttaataccttcgtaatgtttaatatgacttaaagaaccattatcaggtgtaataatgtaatgacctgaatatgttaagcaagcaatgctccgcctatcactacctacacccgggtctaccactgatacaaaaactgtgcctttaggccagtattttacagtttgatataaacgatatgacgctacccaaatgtcatacggtggtatatcatgcgttaagttttcaacacgtatatcatcacttacagtatatgcaactccatacattgcacttacagcgccatcactaagtccaaaatctgattgcaataccaaataatttcccataaaatgcctcctttttttaaaacttcaaaaaaatattatctacatatttaatgttctatattttgaattttcagaattatattaaaatagtacgagtcacttgatgcaaagtcaatagtagtgactataaaaatgataataatagtcagatttatctcattaactaaatttcacggacttgtaatcacttctttatgtttgaattaattgactagggtataacaatagtgtggtgttttataggtcattctttaaatacatcacagaaaatattcgaattcgaaataaaatgcttgcatctttgttttttaggtggtattgtatgtatatcaagtataaaaaatatatctaagagataaaaatatggaggttttatattatgactaactttacttttgatggtgcacacagtagtttagaattccaaattaaacatttaatggtttctaaagtgaaaggttcatttgatcaatttgatgtagctgttgaaggagatattaatgacttcagtactttgaaagctactgcaacaattattccaagctcaattaacactaaaaacgaagcacgtgataaccacttaaaatctggtgatttctttggtactgacgaatttgataaaattacatttgtgacaaaatcagtatctgaaagcaaagttgttggtgatttaacaattaaaggcatcactaacgaagaaacattcgatgttgaattcaacggagtaagtaagaatcctatggatggttctcaagtaacaggtattattgttactggtacaatcaatagagaaaaatatggcattaactttaaccaagcacttgaaactggtggcgtaatgctaggcaaagatgttaaattcgaagcatcagctgaattctcaatctcagaataatctcattacacaatcctcattgttttaatatatatacgaaatgccaactatatcatccctaggtatagttggcatttttcgtttaactcatgtgtaacaagcactaactgttcaccctaattttagacgcctttcattcaggtaggtcttattgaaactgaaaactttgatgaccttttgcaaagccattaactgtataaagcatagatcctccgcccatttctatatcattggaacaaatgatgagttgatttgttccaggtataaattgcggatgagtagaacgtaacatatgcccttcatctcggcctggtatcaatatttgtcctattggataaccccttttattaaaaactaacactcgaccttgaccatacattgctacgtataaattatcgtcactatcaatacaacatgagtctggtccttcatgacctgtaaaatagtacggtatggtagctccaaatggttgtatcgtcacaccatcatcttcaagtgcaatgcgatgtaatcgattggctgttgtttctgttacccatagtactttttcatctgtacttaaagcaataccatttgctacgctaatattttgaatgataggcgtcactgttctaaagtccggcgaaacataataaacgcctcctagtggattggtagagtatcctctaaaatctgtaaaataaaatccacctttagaatcaaataccatgtcatcaatacaatatgctgttgaaagatcttcaataatatcttgtaagttgtcaccattttctgtagctgcaaaaatgcctcctgtagatttaaaatctcctaaataacaaacgaataatcggccatctttatgtattttgattgctgcaggattcgctttgtgacttacaaaaggtcgtttgatttccttcgtttcaggattgattttgaaaatattgccttcgaatacatccaataaaaagagttgtccctgccgatcaaagttcaatccttctagttgcaatccttttttggaaatttcaagccatggttcagctgtaattgtttgtaattcactttcagatataattggaacagcactattggacttcccgctataaaataatgtaggtaaatcttgttgtgacatcatgatcattcctttcatttcattcgttttaactatcaattttattttaaacaagataactatcaaataaaatgataacggtttcatctatctattttatcggtctagtggctgatttcaagctagaaatattgaatgacaatacaactctgttaaaatgatggacgtagacaaatatgcgtattgacgctttattttaaaaattaacatgcttataacatgtttatagaaggagattaacctatgaactatcaagttcttttatattataaatatatgacgattgatgaccctgaacagtttgctcaggatcacttagccttttgtaaagcacaccatttaaaaggtagaattcttgtttctacagaaggtattaacggcacattatctggtacaaaagaagaaaccgaacaatatatggcacatatgcatgccgatgaacgattcaaagatatggtgtttaaaattgatgaagctgaaggacatgcttttaagaaaatgcatgtacgtcctcgaaaagaaatcgttgctttagatttagaagatgacgtcgatccaagacacacaactggccaatatttatcacctgtagaatttagaaaagctcttgaagatgatgacacagtcattattgatgcacgtaatgattatgaatttgatttaggtcatttccgaggtgcaattcgtccaaatatcacacgttttagagatttgcctgactggattaaagagaataaagcgttatttgcagataaaaaagtggttacgtactgtactggtggcattcgatgcgaaaaattttctggatggcttttaaaagaaggtttcgaagatgtagctcaacttcatggcggtattgctacatatggtaaagatcctgaaacaaaaggtgaatattgggacggtaaaatgtacgtatttgatgaccgtatcagtgttgatatcaaccaagttgaaaaaacaattattggtaaggattggtttgatggcaaaccatgtgaacgttatattaattgcgctaacccagaatgtaataaacaaatattagtttctgaagaaaacgaaactaaatatttaggtgcatgctcttatgaatgtgctaaacatgagcgtaatcgttatgttcaagcaaataatattagtgataatgagtggcaacaacgtttaacaaactttgatgatttacatcaacatgcttagttttaattaaatacctttcaaaacacgctttgaaaatccgatttataaaggtttttcaaggctgttttttatgcgcatacataacctgatatgtttttaattatgcgcgtgttatactaaattaaattttaatactgcggggtgtcttaaaatgcacattttagtaacagggtttgcgccttttgacaatcaaaatatcaatccctcatgggaagctgtgactcaactagaagatattattggcacacatacaatcgataaattaaaactaccaacctcttttaagaaagtagataatattataaataaaacgttggcatctaatcattatgatgttgtactagctataggacaagctggtggtagaaatgccattaccccagaacgtgtcgccattaatattgatgatgcacgtattccagataatgatgattttcaacctattgatcaagccattcacttagacggtgcgccagcttatttttcaaatttaccagttaaagcaatgactcaaagtattattaatcaaggacttcctggagcactttcaaatagcgcaggtacatttgtttgtaatcacacactttatcacttaggttatttacaagataagcattaccctcacctacgattcggatttattcatgtgccatacataccagagcaggtcattggtaaacccgatacaccatctatgccattagaaaagatagttgcaggtttgactgcagccattgaagctatttctaatgatgaggatttacacctagccctgggcacaacggaatagttataagtgcacaaacaaaagcaccctaatttgttagtttaagtctaactttagggtgcttttggatgattggtatacagttttactataatgatgtattttagctaaacgacattgtttagtcttctttttttaacttcctaaaatttacaaatgtataaataataaatgctatatttagaatgatgagtatacttactgaaactaaattaaaagtgtctggttctttactaaagatagctgctatccttgctatcaaacttggcaatgaaattaccaacacgatgagcgcataaattttctgtttaattaaaatacaagttccaatgagcgcaattaaaagtactaacccaacgatgaaactctgtttgtcacttaactcaaagaaactatagataggatattttttaataatcaagccacctaaaatcatccataaaaatacgataattccataagtcacatttataacatacgttattttttggtcaccaaatcggactaatgtatttcgtagaatcagcataccaatgacaacacctaaaataacgatactagctatataaagtaaaaatgcaattgtcacatcaaatgtacccaaatctaaaaacctaggaattataatgactgctaaaataaaagcgaagtacaaagtaatatatttatacaaaccggtagtaagacttatctcaggtgataattgatcagccattgacttaatcggtgtattaataattgaacttgtatcttcgttatttttttcagccatagttaaatgatcttcgagctcttccaataactcttctacttctgcttcagtcttacctctaaataacaattcaacacgtaatttttctaaaaaatcttgagattgtttacttaacatcgttttcccctccaaacaagttaatcatccctttattcaaaacttgccatttcgatttaaatacttttagttcctttaaacctgaatcggtaatcgtatagtatttccgcctcgggccgccattactagatttttttattgtcgtatcaacgtatccttttttgtttaaacgcattaaaactggataaatactaccctcacttatctctggaaactcttgattcttaagtttcgtcataatttcatatccatacgtttcgccttgggcaatgagacctaatatcgccccatctaagagacctttcataatctgatctgacactgacattttaatcacctactatcttacataataagatagtacattgagaacttttcgtcaactatcttttattgtaaggtagttgttgtacacattccttaaatgactaacaactttgttaatagggtaatacttacggaagtatattttatttatgggggaggaattaataatgactacaaaaacagtatttgatgtcattgatatggggttaggatatttagtaaatgtgtatgatgcttggaaagttgaaaaggtacttgatgattatcataagcctttttctaataccattcattggcaatttggtcatgtattaacaatttttgaatcggccttagctgttgctggtaaagagaatattgatttaaatatctatagacctttattcggaaatggttcgtctccagatgaatggaaggatgaagtaccgagtattgaaaggattttagaaggtctccaaactttacctgaacgtgcacgaaatctaactgaagatgatttagcaattgaattgaaacagccaattgtcggttgtaataacttagaagagttattagtattaaatgccattcacatcccacttcatgctggtaaaattgaagagatgtctcgtatattaaaaaatttaaaataaatatgtgcttattaaccgttaacaacacgttaacgggttttttatttgtttaaaaggtcacttttttgaatttaataaacaccatctataccagttcttcaccgattctcgaaaaataattatattaatgatttcgttaatttaattttatatttaattattactgtacatcttttgtagttagctttattcttaaattgaaatatgtataaaacatagaaagaaggacgttttaacatggaaaacacggttaaatatcgtaagtttatactccctatcgttgtaggtctccttatttgggcacttacaccttttaaaccggatgctgtggatccaacagcatggtatatgttcgcaatattcgtcgcgacaatcattgcttgtattacacaaccgatgccaattggggccgtctctataattggatttacaatcatggtactcgttggcattgttgacatgaaaacggctgtcgctggttttggtaataatagcatttggttaattgctatggcatttttcatttcgagaggatttgtgaaaacaggtcttggtagacgtatcgcacttcatttcgtcaaattatttggtaaaaaaacattaggattagcatattctatcgtcggtgtagatttaattctagcgcctgctacaccaagtaataccgcgcgtgctggtggaatcatgttcccaattatcaaatcactttctgaatcatttggttcgaaaccgaaagacggatcagcacgcaaaatgggtgcatttcttgttttcacagaattccaaggtaatttaattactgcggctatgtttttaactgcaatggccggtaacccccttgcacaaaatttagcatctagcacatctaatgttcacattacatggatgaattggtttctagctgctttagttcctggacttgtttccttaattgttgtaccttttattatttataaaatttatccaccaactgttaaagaaacaccaaatgctaagagttgggctgaaaatgaattagcgactatgggtaaaatcgctttagctgaaaaatttatgattggtatttttgtcgttgcgttaacactatggattgtcggaagtttcattcatattgatgcaactttaacggcctttattgcgctagcattgttattattgacaggcgtcttaacatggcaagacattttaaacgaaacaggtgcttggaacacattagtatggttctcagtattagtgttaatggccgaccaattaaacaagcttggatttattccttggttaagtaaatccattgctacaagtcttggtggcttaagctggcctatagtcctggtcattttaatattgttctacttctattcacattacttatttgcaagttctacagcacatatcagtgcgatgtatgcagcattactaggcgttgccatcgcagccggtgcaccaccattattcagtgcattaatgttaggtttcttcggtaacctattagcttcaacaacacactatagtagtggtccagcgccgattctattctcttcaggttacgtgactcaaaaacgttggtggacaatgaacttaatattaggtttcgtctactttattatctggattggtttaggatcactttggatgaaagtaattggtatattttaaaatatttaaattagcgctcgaatctcattgatttgggcgctttttaatttgtatttaaaatcaacctttgctaaatcaagactccctttttaaaatacgtttatcctttaaatcattgcgtgcttcactgaaaatttgtataaagatttaagtcattacgtaacatcacataaaatacatttctatactattccgcttcattgattaacattacgtatgccctcataaatcatcatacaaaaaacaccttcgtttaaattcattttaattgcgaattcaacgaaagtgccttatttcatatttaatgtttcaaatttatacgtctgtcactgttactgcacacatacctcagtctcacctcatcatgacacaaaggatattgaaaacacgtataattatctttcctcgtattttatagggtttttgcgaccggatgtttcttcaatttaatgtattgagaaagactatataacacaatacctgtccaaataaatataaacgtaattaattgatctatactaaaaggctctttgaaaacaaatatgccgagtacaaacattattgttggtccaacgtattgaataaatcctattagcgaaagtggaatacgttttgccccggctgagaataggattagtggtattgccgtaatagcaccagaaaataacaaccaaaatgatgacatgttcaatccaaatgacatctgatgttgctgccataaataaataacgtatattagtccagcaggtgcggtaacaatacattcaatcgtaatactgctgatggcatcaatatgtactacttttttcaataatccgtatgtaccaaaggataacgctaatataatagagacgattgggaattctccaatcttgagcgtcatatataatacaccgatgaatgcgaataaaatggctagccattcaaatttattgaatctttcttttaaaaagataagtgcgagcaaaatgctaacaagtggatttatataataacctaaacttgtttgtaggacgtgaccgttcgttacagcccaaataaatgtaccccaatttaatgtaatgacatagcctgctacgacaatcgctaatagctgaatgggcttgcctaacaattgattcatatctcgttgaaatgcattgcgttgtttttgtccaaccgcgagtatgaaaatcatgaatattgctgaaaatataatacgaaaggctaaaatttcaaatgcgcctattgcatcaacgaactgccaatatataggtagtattccccacagaatgtatgcactgagtgctaaaaatatgccttttttatactctgaattcaccttcaaacctccttactttcctaatttttaatttactgcatacgctcacttggttatgctaatataacgattttactaataatatttcgataaagatatcattttgtttatatttcccacatttattcaccaaccactaaacaatattaattttataaataattctgtacaaatcagggtatattgccagaaagactaccatacaacataaaggatggatacaaatgactttacctaaaattggaaagcctgcaacacgcgcgctaaattcacaaggtatatacacattagaagcagtatcacaatatacgaagtcatctctaatggagatgcatggcgttggtcctaaagctatatcaatattggaacaagctttatttcagcaccaactacattttaaaacggaagttcagtcatcattaccttttaagttaacaggagatgtgtcatgcaatcatgcgcctaaacgtcaacaaatgatagattttatagttgttacagcagcattagatattgaattattacgttcactggttacaacagaatttatttggtctgtccctggccgctttgacatatacggacctcaaatattaattcaagaactatctaatcattacaatcaggttgctagtctcaatatccattccagcatcacacatgggtgcttaggttccatgcatggtattgaaatattaaaaactggtaaagagattcattttgctcatttttttgaatttgaaaatcataaaaaggatgccaagttaagcaaagtgacatcttacattgttgttggttaatttatcaaattatatatatcgcaaaaaatcttttgtggttacatgtatatttttatataacaaataatttggcataacatttttgttatatgaacacttattactagagtgcccattgaacatacagtatgattaaatatcatgttatgaaagaaggatatattttgactgtttttaaaaatgagcgcttaagctggttaccatacatagctattgtcattttgttacacgttattgggtttagttttttatggattgctggaaaagaccatcatatcttatttggtatggggattcttgcatatacattaggtttgcgtcatgcatttgatgcagatcacattgctgcaatagataatacggttcgcaaattattacagcaacgcaaagatccatctggtgtgggtttctatttttcaattggacattcatctgtcgtatttttaatggctgtttttttaggggtatctgtaaaatgggctaaagatgaattaccgcatttccaagatattggtggaacgattggtacactagtttcaggtttctttttagtgcttatcggtgtgttgaatctaattattttaatctctttaattaacttgttcgctaaattacgtcgtgaacacattgaagaagctgaagtcgatgcattacttgaatctagaggattggtttctcgatttgtaggaccttatttcaaattaatcacgcgtagttggcacgtattgccacttggctttttatttggacttggttttgatacagctagtgaaattgcgttactcgctctttcttcaggcgcatcacaacaagccatttcatttatcggaatcttatctttaccaattttattcgcatcaggtatgagtttattggatacattagatggtgttgtaatgaagtatgcctataattgggcattcttcaatcctattcgcaaaatctattacaatataacgattactgcgatatcagtcatggcagcattagtgattgggatgattgaattgctacaaattcttgctgataagttagatttacatggtgcgttttgggcattcattggttcgatcgaatttgattatttaggctatattttagttgcattatttttaattacttggcttatttcaagtttaatttggaagtttggtcgcatagaacacaaatggtctagataaggcaacttgtcttgcaactacctttgtattgttgcatttttagacaccctgcacacttcttccattatgctacgctctcagtagtcatctttaaatcgtttcttttagagatgacttcattttgagagcgtatttttctatttaaaatgtatttatccaaaattcaatgctttcgaatttaaaatttcagtatttctgtttaaaatttaattataatctttaatacaggaggcgctatgcttatgaatattgcgaagttagagaattatttacaaattgattcatctcgttataatcgaccgagtattgaagcattaaattattatgcaacacgttttatgttaactgtaccttttgaaaatattgatgttcaaaatagtaagccgatatctataaatatcgatgcactttttaataaaattgttcatgataaacgtggtggtttttgttatgaattaaatacatttttcaaagcctatttacaacaaaaaggatttaatcctgaattaatgtcagctactattcacacacccggtggcggtcgtagtctgaacggttcacatgcttcacttgttgtttctataaatgatgtattctatgtaactgatgttggctttggagacttacctctacatgccattcctattacttcatctgagcatacacaaccaattactgatatcagtggtacattccgcgctatttttaacaacgaagacaaggatattttctatgttcaaaaattcgaaaatgatcattggcatacaaaatatgaagctgaattcaaacctaaacaaatagaagattttaatagcaacatcgaatataatcaaacgcatccagattcaatatttgtacagcatttattaattacaatgccacaatcatttggccgtgctacaatgtctgaaaatcatttaactttaacaaggaatggtagctcagaaaaatttgatgtcactaaagataactataaacattttttagaaaaatattttggactaaatgtaactattaatcgtattgaaaaacaataatagtaaaatataaaaatatgggcgtatcttacttattgtaggtagcgccccttttttatgcttcataaacacaacaaaaaggatatgacacaaacttcatgtcacacccttcttttgaaccgcttcattttacttaagcaagtgcatctacaacataaatgacacctacgaatacaaatgcaatagcaatcatcgtcgaaataaagacgatacccattaatggattaaataataaaatgacaccgaaaacaatacctaataaattaaaaatcactgaaattagttttaagctaccactacccgaaaacgtaaataatccagagatagaactaaaaataaaccaaaaagcaaacatataaataaagaatgctgaacttgcgccaacattaaaaataactaatagaccaaatagaatatctacaatccccataaacagaatccaattttggttaccacctactaaagcttttgcttttctacggtaaacgatttgaatcacaccgttaattaatacaaacagtccaatcaaccaggtaatagcataaaaattttcaattggaaatgtaaaaataacgactgccaacattaataataatacacccattattaaactagaccatttaataccttgatttcctttttccataacaatcaattcctttcaaataaaaccctcttttaatttttacaaaaaatttattatacaataattaaattcccttttctcaatttacacaaacatcatcacttagaaagcaccattgcttttgtctaatatgtacgatgaatctgtatcctcactcaaaaatctactaagtagcgatagctttcaactctgtaaggttcattcattgaattgtaagtttagataaaggctactactccaaacattatttaaaatgaaattaaatacaaaaggagtgagactatgacgatattatcagtgcaacatgtttcaaaaacatacggtaaaaagcacacatttcaagcacttaaagatattaactttgacatacaaaaaggcgaattcgttgcgattatggggccttctggatcaggtaagacaaccttattaaatgtactaagttcaattgaccaaatttctagcggtagcgtgattgctaacggacaagagcttaataaacttaatcaaaaagcacttgccaaattccgcaaagaatcattaggtttcatcttccaagattacagtattctgccgacattaaccgttaaagaaaacattatgttacctttatctgttcaaaaaatgtcgaaggcaacaatggaagaaaattataaagcgatcacgacagcattaggtatttatgacctaggaaataaataccctagcgaattatctggtggtcaacaacaaagaactgcagcagcgagagcatttgttcacaaaccacaaatcatatttgcagatgagccaacaggcgcactcgactcgaaaagtgcaaatgacctattacaacgtttggaagaaatgaataaatcgtttgatacaactattgtcatggttacacatgatccggttgcagcaagttttgcagaacgtgtcatcatgctaaaagatggccaaattcatacacaactttatcaggaaggacgttctaaacaggccttttatgaagacattgtacatcttcaatcagtattaggtggtgtctcaaatgacatttaaccatatcgttttcaaaaacttacgacaaaacttaaaacattatgcaatgtatttattttcattattttttagcatcgtcttatatttcagttttacaaccttacagtttactaaaggtgtaaataatgacgactcgatggccatcattaagaaaggtgctttagtcggatcaatatttttatttatcattattgtcatctttttaatgtatgccaatcatttattcgtaaaacgccgtacacgtgaatttgcgctatttcagttgattggtttaacacgacaaaacattttgaaaatgttagcacttgaacaaatgatcgtatttttaatcacaggtgttgtcggtgtattatgtggcattgcaggtgcacaattattgctttccatagtatctaaattgatgtcgttatcgattaacttatcgatacatttcgaacctatggcccttgttttaactattttcatgctaattattgcgtatgtactgattttatttcaaagtgctttatttctaaaaagacgtagtatcttatcaatgatgaaagattcaattaaaactgatgccacaactgctaaagtaacgactgcagaggttatttcaggcgtattaggtattgctatgattgcactaggctattatatggcgacagaaatgtttggtacgttcaaagcactaactatggctatgacatcaccgtttatcattttatttttaacggttgtaggcgcctatttattcttcagaagttccgtgtcacttatttttaaaacattgaaaaaatcaaaaaatggacgcgtatctattaccgatgttgtattcacatcgtctattatgtacagaatgaagaaaaatgccatgtctttaactatcattgcaattatttctgcagttacagtaactgtattgtgttttgcggcattatctaaatcaaatacagatcaaacccttacatctatggcaccaaatgaatttaacgtggtcgctactcaagatgctaaacaatttgaaactaaactaagccaacaacaaattacattttctaaaaatgcttacgaaactattactgtagataatgttaatgatcaggttattactttggaaaatggtagtgattcaggtcgcacgaattctattttaagtgcaaataacaagttaacaggcaacaatgccatcattacaaatacaaaatcgctgcctaacattattaatatccatttaaacaaagatttagtagtaaaaggtactaagaatgaaactttccgtgttacacaagaagacaaaggtaaggtttatcctttaaatctaagcttcaactcacctgtcatcgaagtaagtcctgaaaagtatcagcagttgaaaacacaaaataacgttcatactttttatggatatgatattaaacaaacatcacaaaaggaaaaagctcaagcaattgcaaaacagtttggagacaaagtcatcacgtatgatgaaatgaaaaaagaggtcgatgctactaacggtattctaatatttgttacatcatttttaggattagcatttttagtagcagctggatgtattatttatattaaacaaatggatgaaactgaggatgaactaagtaacttcagaatattaaaacgcataggctttacgcatacagatatgcttaagggattattattaaaaattactttcaacttcggtttaccattattgattgctatattacatgcagtattcgccgcaatagcatttatgaaattgatgggtaatatttccttcatgccggttattgtagtaattgttgtatacaccctcatttacattacttttgctttaattgcttttatacattcaaacaaattgattaagaaaaccatttaacacttacgattaaaagatgcttcattagatattttgattttaagcaatgcagtataactattaattgatttaagaaaaggagagattgaatcatgaaatttagagaattagtaaaacaatcatatgaggatttgaaaaatttgactgtaacttggtataacgtcattgctttaacaatacttgttattgtattaagctcattcacaacaccaatgataggcattccagctggtttattaggtggcgcctattatttaaaacgtcgtgaagaaaaaggtaaataaataagccttatgtgctaaactcaatatgtatttcctaccaaagaaaacataaggagtttggacatcttgaaggagatactattgttggtcgtcgtcatggtagtgcaatcattactttggtagaaagagtatccaagatgattatcaccttacgacccttaggtcgtaaggcaactgatatagaaaacgctctacactcaatgttttcatctttaccttctcatatatttaaatcaattacttttgattgtggtaaggagttctcaaactggaaaacattatgtaactgtcacgatatatctatattttttgctgatccaggcacgccatcacagcgaggtttaaatgaacattctaacggaatacttagacgcagtggattagataaagaactagatttcaatttagtaacagacgatcatatcatcagtgttgctcaaaaaatcaatcatcgtcctagaaaatctttaggttatagaacaccattggaagtatttatgagtttcatcgaagatgataaacttgtccagcttaatttgacaatctaaagatttataaaaaagccgttggtctcttcgaaactacggcttttctctgtgctataaaatcagtatggcgaagcacagtgatcattgaattctgactttatataatcaagagtatctttggatacactgatgatatctataacagcattgctaatgtagaatatattttcttgattatagaatacaataaatggctccactaaaccttttttaatatataaagaataatcaattaagtctttgttttttatatttttaatagttgcaataacatacttctcatcggtagaatggatttcttcgtaccagttagtaatattaaaaaaacgaccaattcttgttttttctctaaatttaacaggatataagtattcagacaaaaatgtacatttcgtctttgattggttattaaatataacattaataatattagaaatttgctttttattgagaacatcaatatctaagcgtatcctatttttctcaggtgcttgaaaatagggaatttcatgttctaaatcaaaatgtatttgttgtgtttcaaggttaataatcattttaatctccaattctttttaggttagcatcgtatgtaccacttcttgttttcttgctacctaaattcttaatactgcttgcaccttttcattttatcttctcatatatttaaatcaattacttttgattgtggtaaggagttctcaaactggaaaacaatatgtaactgtcacgatatatctatattttttgctgatccaggcacgccatcacagcgaggtttaaatgaacattctaacggaataattagacgcagtggattagataaagaactagatttcaatttagtaacggatgatcatatcatcagtgttgctcaaaaaatcaatcatcatcctagaaaatctttaggttatagaacaccattggaagtatttatgagtttcatcgaagatgataaacttgtccagcttaatttgacaatctaaagatttataaaaaaggagagattgaatcatgaaatttagagaattagtaaaacaatcatatgaggatttgaaaaatttgactgtaacttggtataacgtcattgctttaacaatacttgttattgtattaagctcattcacaacaccaatgataggcattccagctggtttattaggtggctcttattatttaaaacgtcgtgaagaaaaaggcaagtaagcacattccatcggtatagaacattgctatgacctttcaagtcagattttaatatcaacaagtagcgtttatcgctgcttgttttttatggattgcttataaaatcatcatgtttaaacgatatgtcactttgaaaactagcaaacaccataaaagactacaatttttttatttttataaacccctttaaatcaacgtttctaaggtttttaaaaatcttttttaatttattttcaaaaaacactgtacattatgccaatatgagcgtatagttggtcttacgtaataaaagctcgtgaattaaattgtagtgtatttgtttagaatatcctcttttttagttatgaatttgttacaaatattaagtgcaaaagcacacggaggttttctatatgaataacggtacagtaaaatggtttaacgcagaaaaaggttttggtttcatcgaacaagaaaatggcggagacgtattcgtacatttctcaggtatcgctagcgatggctacaaaactttagaagaaggtcaaaaagttactttcgaaatcactgaaggtcaacgtggagaccaagcagttaacgtacaaactgtttaatcttacaacataaaacgactcattataaatgaatcgctttgattaccaacaaggttctaaatcttgttggtatttttttatgctattttggataatataaataatatgagacgataccacgatgatttataaaaacttatttgccaaatacacactaaggaaaattatgaggctgagtataccaattactgatataatagaaagcgcatttgtcatcgtatttctagctttagtcgtttgtacttcactaggatcttttccattcataaaagcaacaattcgatcgtagttgtccattttatgcactttttttaaatcttctattttcatagatgcataaaaacctattcccaaaatgattgccaccgttacaccccaagtccaattccaataaacaactaaaggtcccattaaaattgcagctaatgtcatgaaaataagcatcacatatgtccataagttaagacttcgttgcgctttaatatcaggtacaaatggaatggtcccttttactaaatcatctaaagttacattgaacaattcacacatcattaataagttatgtatgtctggtaagcttttgtcattttcccaattagaaatactctgcctagatacatataacttttcagcaagatattcttgtgaataaccatctcgttccctatactttttaatttgtttactcagattcaattacatacgcctccagtcaattagtacaatcattacaatcagactatcagataaagttaaatcaagtcacctttatgattgactaaatgttttgacatacgacaacatcggggttcgaagactcccttaagacagacctgtatgattacgcgcttgtaattttctcaatgccaacttgaatttcacttattaatgatgcaacttttccatgctattcaatgcttgcaaagttagtcctagttaagagattacgttcacactatttactattcgattttccagctttccaactatgcttttctaatcttttttgtgctataaattctaccgcttcaaaaatacatactgcactgatgaaccagcttaggaaaccaacaacaatgctaatcaaccacatgtgcgtcatatgtaacatcatccatgtaactaaaatacaaactaatacccctgtcataccaaacactgcgccacgacttacatgcacagcgactttatcaccatattgcatacctgtaataaacatagacactaaaaatactgccggaaacgttgcaaatataccgccaaattctttccaaggtagtgttacagatacaatataacttaataatactgcaaatccccccacaaaaaatttcattaatgttaatttcatgatgttctgcctccaataatttattacttaataactgaatacaactaattatcacgcattttccaaactataaatgtctaatactgaatattgcgagggaaatgacaaaccaacaaacaactgtgaatattgcgcctttccgataacctttatgcttaatgtagagagatgtcaaaaatacagttaatatacaagacagaataccgacaattgctccagtactaagattcatcgacatctccactaattgcgtaccacgatgatctaaagctaatgcgataatagccgcaagaaagactgccggcatagtagctataatacctcctaacttaccacctaccttatcagcaataattgaagctaatgcaacagcgataccaccaatgacaaaatgaagaattgcacttccaattgaaaacatcttcaacgtacctttctataattaattcaatacaaaacgtatcattcacacaaagtgtaaaacttaaattttctactgtaaaggcaactcaagcgatgttcataaagctttcatgatactttcataaactagcaataaagggttcaaatgaaagtatatccagctcaaattagggagtgggacagaaatgatattttcgcaaaatttatttcgtcgtcccaccccagcaaggttgactagaattgaaaaaagcttgttacaagcgcattttcgttcagtcaactactgccaatataacttcgtagagcatagaacattgatttatgtaccagcctgatcaacatataaatataaatttttatgtttcacgtaaaacaaaaaaaaaagacaaagctgttatgatcttagctttgtcttttatgtgttagtcatcatgtatacgacatcctactactaacgtttatatattcgaatttttatttcataataatcttcatgatctttgtctttatgctcaacatgtaatcctgtttgttgaatcgcttggatacttttgcctacctcatctcgtgcttgagtgacatcttgtgcaaagcgaaggttttgtgctttgactttttcgggccccgttttttggcgtactctatcttcagtctgtttcacatttagcttttgtgcaatgacttgctcaatcaacgcttcttgttcgctatcagacaatgataataccgctctcgcatgacgttcagtaattttaccttctcttaagcgaagtagtactttcggcgccaacttcaataaacgcaacttatttgcaataaagctttgacttttacctaaactttttgccaattcactttgcgttgtatcaccaatttccaataatttcttataggcttccgcttcttcaacaacagacaaattttctctttgaatattctcaattaatgcaacaacagccgtctcttcatcatccatatcacgaataataacgtctgcttgaggtaaatttagtgattgtattgctctaaatcggcgctctccagcaataatttcaaacatatcttcttcaatcggtcttacaacaataggttgtagtaaaccatgttcatgtattgattcagcaagttctttaattttatttggttcaaacacctgtcttggttgataacggttgggaacgatacgttcaatttgaatggattcaacattactattgcgatcttcttcaatatgtccaatgatgtcatctttgtttttcaaaccaaataattttgaaaaaggttttttcattatccattcgctccttttatgttagttgtaaaggattatgcattatttttcaagtaaaggagtcttattaggcgtccctggttttcttggatactttttcggcgtctgtctttttttatcaataatgaacatctggcgctctccagcatcttctggcaattcaaaggtatgtgtttctgtaacattaccacctaacacactaattgcaaattttgcttcttctaattcttcttcaccttttgaagattttaatgcaacaaactgtccaccttttttaactagcggtaaacacaattcacttaacacggataatctagctactgctcttgcagtaacaacatcataagactccctgtagacacccttaccaaatgtttctgctctatcgtgtataaagctgacatcctgtaattgtaattctgacgctaaatggtttaaaaattgaatacgcttatttaatgaatcaacaatcgtcacttttaactgcggaaacattatttttaacggaatacttggaaaaccagctccagcgcctacatcacatatacttataggctgattaaaatcaaaataaaaactaggtgcaatggaatcataaaaatgtttcaaatatacatcgtgttcatctgtaatacttgtcaaattcatcttttcattccattcaacaagtaaacgataatatgtttgaaactgttgtttttgagtctcagttaattgaatattatgttcttttaattgttctgctaaccattctacagtcattagtcactcaccctttggagtttaccttgttctaagtaaatcaataatatagatatgtctgctggatttacccctgatattctagaagcttgtgcaatatttaaaggttttacttctgataatttttctcgcgcttcagtcgccaaactatcaatcttactataatctaagtcttctggaattttcttctcttccatacgcttaactttctcaacttgttgtagtgatttattgatataaccttcatattttgtttgtatttctacttgttcttcaacatctgcattcaattgatgttcttcttctaaaagttctaaaattatatcgtaagtcatttcaggtctgcgtaataaatcgatagctaaaataccatcttttaagcgagaaccaccatgttgttcaataatcgcttgcgtatgttcgtttggtttaatacgaatatctgataaacgcttaatttccgcatcaatttgctgacgtttttcattaaaacgtgcatatctttcttcagaaatcataccaagttcatatcccatatccgtcaatctcaaatcagcattatcatgacgtagtaacaaacgatattctgcacgtgatgttagtaaacgataaggttcattagtacctttagttacaagatcatcgattaagacaccaatatatgcatctgaacgacttaatatcttttcgcctgtgtttaacactttacctgcagcgttaatacctgccatcaatccttgtcctgctgcttcttcataaccagatgtaccattaatttgacctgcagtatataagtttttaatcattttcgtttcaagtgtaggccataactgcgttggcacaatcgcatcatattcaattgcgtagccggcacgcatcatatctgctttttcaagacctggtatcgtctctaacatttgacgttgcacatgttcaggaagacttgtagacaatccttgcacatatacttcatttgtattacgaccttcaggctctaagaaaagttgatgtcgcggcttatcattaaatcgaacaaatttatcttcaattgaagggcaataacgtggcccggttcctttaatcatccctgaatacattgcagatagatgtaaattatcatcgataactttgtgtgtttcagcattagtatacgttagccaacatggcaattgatctaatatatattctgttgtttcaaagctgaatgcacgacctacatcgtcacctggttgtatttcagtcttcgaatagtcaattgtttttgaatttacacgcggtggtgtacctgttttaaaacgaacaatatcaaaaccaagttctcttaaattgtctgataatgtgattgatggtaattggtgatttggtccacttgaatacttcatattacctaaaatgatttcaccacgtaaaaatgttcccgttgtaataattactgctttagataaatactctgtaccaatatttgtacgtacacctttaacttcattatcttctataataagttcgtctaccataccttgcattatatgcaaattttcttcatcttcaatcacgcgtttcatttcttgttgataaagtactttatctgcttgcgctcttagtgctcttacagcaggtcctttacctgtatttaacattctcatttgaatgtgtgttttatcgattgtttttgccatttgtccacctaaagcatcaatttcacgaacaacgatacctttagctggtccacctacagatgggttacatggcataaatgcaatattatctaaatttattgttagcattaatgttttagcaccacgtcttgcagatgctaaacctgcttctacacctgcatgtcccgcacctataacgattacatcatattcttgaaccacaatataaacctccttatttgatatcttactagccttcttaagacggtattccgtctatttcaattactatttacctaagcagaattgactgaataactgatcgatgagttcatcacttgcagtctcaccaataatttctcctaatatttcccaagttctagttaaatcaatttgtaccatatccataggcacaccagattctgctgcatcaatcgcatcttgtatcgtttgtcttgcttgttttaataatgaaatatgtcttgaattagaaacataagtcatatcttgattttgtacttctccaccaaagaacaaatctcgaatttgtatttctaattcatcaataccttcttgttttaacattgaagtttgaattaatggcgtatcacctatcatatctttaacttcattaatatctatgttttgctctaaatccattttattaacaattacgattacatcttcatttttaaccacttcatataatgtgtaatcttcttgagtcaatgcttcgttattgtttaatacaaataaaattaagtctgcttggctaagagcctttctagagcgttcaacaccaatcttctctactatatcttctgtctcacgtataccagcagtatcaactaatcttaatggcacgccacgaacattgacgtactcttctaagacatctctagtagtacctgctacctcagttacaatcgctttattatcttgtattaaattatttaacatcgatgatttacctacgtttggtttaccaacaataactgtagataaaccttcacgcataattttaccctgcgcaccggtatctaataaacgattaatttcctgtttgatttctttagactgctctaaaagaaattcagtagtcgcatcttcaacatcatcgtattcaggataatcaatattcacttccacttgagcgagtatctctaatatagattgacgttgttttttgattaagtcacttagacgaccttcaatttgattcatcgcaactttagaagctctatctgtcttcgagcgaataaagtccataactgcttcagcttgagataaatcaatacgaccatttaaaaaggcacgttttgtaaattcacctggctcagccattctagcgccatatgtcatagtaagttccagcactctattaatcgttaaaataccaccatgacaattaatttctataatatcttcgcgtgtaaatgtttttggcgctcttaacacagacaccataacttcttcaaccacttctttagactctggatcaataatatgaccgtaattaatcgtatgtgatggaacatcatttaaaagatgttttcctttatataatttgtcagcaatttcaacggcttgcggtccagacaatcgaacaattccaattgccccttcacccattggtgttgaaatactcgtaattgtatctaaatccatattgctactcgcctccttcaacgatgtgaatacattttaaagtaagttattataaccctaaggtcagtcttacgtttgtctgaggtaagacttcgggatgtgttgagtggttaatgttttccttcccctaccctatccttacttaatctttttattaaaaactttggcaattttaagtacgtgctcaagactattctgtatttgtaaagtcgtcatatctttagctggctgtcttgctattacaataatatctttggccaatatatgcgacttatgtactttgaaattttcacgtattgctcttttaatcttgtttcttaacactgcattacctagttttttagaaacactaatacctaagcgaaaatggtctatttctttattattacaagtgtatacaacaaattgtctgttggctacagaatgaccttttttatatattctctgaaaatctgcattctttttaattcggtaagctttttccaataacatcactcgcttatttatcgtttttatttgaagctatatttaaacttctattgagcttataacataaatttctatttattcttaatttaaacgaaaaaaaagatcactgatgagtcagtgatcttatgcagataaaactttacggcctttacgacgacggcgcgctaaaactttacggccattttttgtgctcatgcgttttctgaaaccatgaactttactatgtttacgtttatttggttgataagtacgttttaccatgcaaaacacctccatctttatacagttatctaatataccagattatgcagactctgatcactttaatagataagattttgcgtttcttagattaaaattctcgtattagctcattgattatctagtcataattcaagcaactactacaatataacaaaatcctatttataacgcaagttcattttatactactgctcaatttttttacttttat
